United States Patent Application Publication US 2022/0211063 A1 - sequence listing, part 34

SEQ ID NO: 104 - DNA, 7752769 bp, Penicillium roqueforti (residues 1-1,938,193 of 7,752,769)
  misc_feature (471)..(2988): n is a, c, g, or t
  misc_feature (125072)..(125245): n is a, c, g, or t
  misc_feature (177032)..(177807): n is a, c, g, or t
  misc_feature (384131)..(384321): n is a, c, g, or t
  misc_feature (555855)..(555880): n is a, c, g, or t
  misc_feature (601269)..(601369): n is a, c, g, or t
  misc_feature (676760)..(677104): n is a, c, g, or t
  misc_feature (719500)..(719699): n is a, c, g, or t
  misc_feature (1142715)..(1142932): n is a, c, g, or t
  misc_feature (1186263)..(1186885): n is a, c, g, or t
  misc_feature (1335746)..(1335917): n is a, c, g, or t
  misc_feature (1623895)..(1624083): n is a, c, g, or t
  misc_feature (1638049)..(1638216): n is a, c, g, or t
  misc_feature (1653229)..(1653350): n is a, c, g, or t
  misc_feature (1825533)..(1825713): n is a, c, g, or t
  misc_feature (2226341)..(2226489): n is a, c, g, or t
  misc_feature (2393331)..(2393497): n is a, c, g, or t
  misc_feature (2448034)..(2448172): n is a, c, g, or t
  misc_feature (2535309)..(2535422): n is a, c, g, or t
  misc_feature (2536982)..(2537204): n is a, c, g, or t
  misc_feature (2854127)..(2854165): n is a, c, g, or t
  misc_feature (2984530)..(2984779): n is a, c, g, or t
  misc_feature (3020832)..(3020991): n is a, c, g, or t
  misc_feature (3033668)..(3034045): n is a, c, g, or t
  misc_feature (3159261)..(3159382): n is a, c, g, or t
  misc_feature (3215495)..(3215760): n is a, c, g, or t
  misc_feature (3224555)..(3224857): n is a, c, g, or t
  misc_feature (3317439)..(3317719): n is a, c, g, or t
  misc_feature (3542087)..(3542262): n is a, c, g, or t
  misc_feature (3623094)..(3671593): n is a, c, g, or t
  misc_feature (3674133)..(3676169): n is a, c, g, or t
  misc_feature (3690943)..(3691177): n is a, c, g, or t
  misc_feature (3731688)..(3731946): n is a, c, g, or t
  misc_feature (3989072)..(3989247): n is a, c, g, or t
  misc_feature (3992031)..(3992142): n is a, c, g, or t
  misc_feature (4101392)..(4101829): n is a, c, g, or t
  misc_feature (4338949)..(4339078): n is a, c, g, or t
  misc_feature (4339456)..(4339760): n is a, c, g, or t
  misc_feature (4384123)..(4384285): n is a, c, g, or t
  misc_feature (4533763)..(4533989): n is a, c, g, or t
  misc_feature (4697083)..(4697253): n is a, c, g, or t
  misc_feature (4793877)..(4796592): n is a, c, g, or t
  misc_feature (4802191)..(4802563): n is a, c, g, or t
  misc_feature (5082556)..(5082699): n is a, c, g, or t
  misc_feature (5096738)..(5096894): n is a, c, g, or t
  misc_feature (5239486)..(5239624): n is a, c, g, or t
  misc_feature (5277839)..(5278023): n is a, c, g, or t
  misc_feature (5381237)..(5381436): n is a, c, g, or t
  misc_feature (5479330)..(5479761): n is a, c, g, or t
  misc_feature (5512321)..(5512517): n is a, c, g, or t
  misc_feature (5631252)..(5631339): n is a, c, g, or t
  misc_feature (5721734)..(5721958): n is a, c, g, or t
  misc_feature (5728851)..(5728996): n is a, c, g, or t
  misc_feature (5774044)..(5774133): n is a, c, g, or t
  misc_feature (5808510)..(5808554): n is a, c, g, or t
  misc_feature (5832986)..(5833103): n is a, c, g, or t
  misc_feature (5846543)..(5846734): n is a, c, g, or t
  misc_feature (5859671)..(5864392): n is a, c, g, or t
  misc_feature (5865373)..(5948372): n is a, c, g, or t
  misc_feature (5948953)..(5949387): n is a, c, g, or t
  misc_feature (6008441)..(6008529): n is a, c, g, or t
  misc_feature (6324411)..(6325132): n is a, c, g, or t
  misc_feature (6373261)..(6373621): n is a, c, g, or t
  misc_feature (6805627)..(6805629): n is a, c, g, or t
  misc_feature (6847060)..(6848075): n is a, c, g, or t
  misc_feature (6999759)..(6999891): n is a, c, g, or t
  misc_feature (7043521)..(7047328): n is a, c, g, or t
  misc_feature (7057075)..(7057580): n is a, c, g, or t
  misc_feature (7108482)..(7109253): n is a, c, g, or t
  misc_feature (7114390)..(7115078): n is a, c, g, or t
  misc_feature (7152168)..(7152363): n is a, c, g, or t
  misc_feature (7347495)..(7347601): n is a, c, g, or t
  misc_feature (7355758)..(7355762): n is a, c, g, or t
  misc_feature (7379240)..(7379514): n is a, c, g, or t
  misc_feature (7441661)..(7441886): n is a, c, g, or t
  misc_feature (7525010)..(7525129): n is a, c, g, or t
  misc_feature (7750626)..(7752539): n is a, c, g, or t
tccctactataagtactcaaaatttcaaagggttaaaatatagttaagaggtagttatggtgcgtacaagaaaattacccttttaggataactgagctcaaaatataggtgaattttaatcgctcgctataggcgcaatctttgtctaaattaaaagtagtaaattggatgcacaaatttaaggtccctactataagtactcaaaatttcaaagggttaaaatacagttaagaggtagttatggtgcgtacaaaatatggccgaattaggttagtgtcattcttcccgtagccctaaacctcaaagatataccttaactttaaccacgaatttcagacgctacactagctggatacgaaagataagatatgatctagaatgcttaagaaaagggctttctagtgatactaaaataatagtaaatactcattattttatatgtacttaggctctatgatttcctatatagannnnnnnnnnnnnnnnnnnnnnnnnnnnnnnnnnnnnnnnnnnnnnnnnnnnnnnnnnnnnnnnnnnnnnnnnnnnnnnnnnnnnnnnnnnnnnnnnnnnnnnnnnnnnnnnnnnnnnnnnnnnnnnnnnnnnnnnnnnnnnnnnnnnnnnnnnnnnnnnnnnnnnnnnnnnnnnnnnnnnnnnnnnnnnnnnnnnnnnnnnnnnnnnnnnnnnnnnnnnnnnnnnnnnnnnnnnnnnnnnnnnnnnnnnnnnnnnnnnnnnnnnnnnnnnnnnnnnnnnnnnnnnnnnnnnnnnnnnnnnnnnnnnnnnnnnnnnnnnnnnnnnnnnnnnnnnnnnnnnnnnnnnnnnnnnnnnnnnnnnnnnnnnnnnnnnnnnnnnnnnnnnnnnnnnnnnnnnnnnnnnnnnnnnnnnnnnnnnnnnnnnnnnnnnnnnnnnnnnnnnnnnnnnnnnnnnnnnnnnnnnnnnnnnnnnnnnnnnnnnnnnnnnnnnnnnnnnnnnnnnnnnnnnnnnnnnnnnnnnnnnnnnnnnnnnnnnnnnnnnnnnnnnnnnnnnnnnnnnnnnnnnnnnnnnnnnnnnnnnnnnnnnnnnnnnnnnnnnnnnnnnnnnnnnnnnnnnnnnnnnnnnnnnnnnnnnnnnnnnnnnnnnnnnnnnnnnnnnnnnnnnnnnnnnnnnnnnnnnnnnnnnnnnnnnnnnnnnnnnnnnnnnnnnnnnnnnnnnnnnnnnnnnnnnnnnnnnnnnnnnnnnnnnnnnnnnnnnnnnnnnnnnnnnnnnnnnnnnnnnnnnnnnnnnnnnnnnnnnnnnnnnnnnnnnnnnnnnnnnnnnnnnnnnnnnnnnnnnnnnnnnnnnnnnnnnnnnnnnnnnnnnnnnnnnnnnnnnnnnnnnnnnnnnnnnnnnnnnnnnnnnnnnnnnnnnnnnnnnnnnnnnnnnnnnnnnnnnnnnnnnnnnnnnnnnnnnnnnnnnnnnnnnnnnnnnnnnnnnnnnnnnnnnnnnnnnnnnnnnnnnnnnnnnnnnnnnnnnnnnnnnnnnnnnnnnnnnnnnnnnnnnnnnnnnnnnnnnnnnnnnnnnnnnnnnnnnnnnnnnnnnnnnnnnnnnnnnnnnnnnnnnnnnnnnnnnnnnnnnnnnnnnnnnnnnnnnnnnnnnnnnnnnnnnnnnnnnnnnnnnnnnnnnnnnnnnnnnnnnnnnnnnnnnnnnnnnnnnnnnnnnnnnnnnnnnnnnnnnnnnnnnnnnnnnnnnnnnnnnnnnnnnnnnnnnnnnnnnnnnnnnnnnnnnnnnnnnnnnnnnnnnnnnnnnnnnnnnnnnnnnnnnnnnnnnnnnnnnnnnnnnnnnnnnnnnnnnnnnnnnnnnnnnnnnnnnnnnnnnnnnnnnnnnnnnnnnnnnnnnnnnnnnnnnnnnnnnnnnnnnnnnnnnnnnnnnnnnnnnnnnnnnnnnnnnnnnnnnnnnnnnnnnnnnnnnnnnnnnnnnnnnnnnnnnnnnnnnnnnnnnnnnnnnnnnnnnnnnnnnnnnnnnnnnnnnnnnnnnnnnnnnnnnnnnnnnnnnnnnnnnnnnnnnnnnnnnnnnnnnnnnnnnnnnnnnnnnnnnnnnnnnnnnnnnnnnnnnnnnnnnnnnnnnnnnnnnnnnnnnnnnnnnnnnnnnnnnnnnnnnnnnnnnnnnnnnnnnnnnnnnnnnnnnnnnnnnnnnnnnnnnnnnnnnnnnnnnnnnnnnnnnnnnnnnnnnnnnnnnnnnnnnnnnnnnnnnnnnnnnnnnnnnnnnnnnnnnnnnnnnnnnnnnnnnnnnnnnnnnnnnnnnnnnnnnnnnnnnnnnnnnnnnnnnnnnnnnnnnnnnnnnnnnnnnnnnnnnnnnnnnnnnnnnnnnnnnnnnnnnnnnnnnnnnnnnnnnnnnnnnnnnnnnnnnnnnnnnnnnnnnnnnnnnnnnnnnnnnnnnnnnnnnnnnnnnnnnnnnnnnnnnnnnnnnnnnnnnnnnnnnnnnnnnnnnnnnnnnnnnnnnnnnnnnnnnnnnnnnnnnnnnnnnnnnnnnnnnnnnnnnnnnnnnnnnnnnnnnnnnnnnnnnnnnnnnnnnnnnnnnnnnnnnnnnnnnnnnnnnnnnnnnnnnnnnnnnnnnnnnnnnnnnnnnnnnnnnnnnnnnnnnnnnnnnnnnnnnnnnnnnnnnnnnnnnnnnnnnnnnnnnnnnnnnnnnnnnnnnnnnnnnnnnnnnnnnnnnnnnnnnnnnnnnnnnnnnnnnnnnnnnnnnnnnnnnnnnnnnnnnnnnnnnnnnnnnnnnnnnnnnnnnnnnnnnnnnnnnnnnnnnnnnnnnnnnnnnnnnnnnnnnnnnnnnnnnnnnnnnnnnnnnnnnnnnnnnnnnnnnnnnnnnnnnnnnnnnnnnnnnnnnnnnnnnnnnnnnnnnnnnnnnnnnnnnnnnnnnnnnnnnnnnnnnnnnnnnnnnnnnnnnnnnnnnnnnnnnnnnnnnnnnnnnnnnnnnnnnnnnnnnnnnnnnnnnnnnnnnnnnnnnnnnnnnnnnnnnnnnnnnnnnnnnnnnnnnnnntagtaaattggatgcacaaatttaaggtccctactataagtactcaaaatttcaaagggttaaaatacagttaagaggtagttatggtgcgtacaaaatatggccgaattaggttagtgtcattcttcccgtagccctaaacctcaaagatataccttaactttaaccacgaatttcagacgctacactagctggatacgaaagataagatatgatctagaatgcttaagaaaagggctttctagtgatactaaaataatagtaaatactcattattttatatgtacttaggctctatgatttcctatatagaggggcctaataggctgaatataatacaaatataccaattcttagcatttatataagtaatatagattttctaaatattaattatatataaaaatggacactaattgtgggaaatcagctagcttttggtataaaattgaattcaataaacctaaaaataagggtttctataattaaaaatgttatacttaaataggaagatatacctacttctactcatatatatctatatactaacgcctactaatcctctaagtactagaatagtattagttgacacggtgagcggggcgctggaaccggctcccattgcaccgcccctctgccgcccccgaccgcctgcctgtctccactatccccttgccccttccggtatggcgccatctcctctagccccgtttaggtttagtgccgtccctggccgctttactgcctctgcctacttgccgtctatctataaaagactgctcgccctctccatctcttgtcgacgcactttctcttctcttttttcccttctgcccccctttctttttttctttctcgcccttaccgtctcctgcgcatttggctttcagcccgacgcactgcccctttcattttaccggagatgccgctcgatccgacgccgtggtcgttcggaccagcgtgggctgcaatgctatccagtcgctcaggaacagaaacactgcggtgatctagccatccatcgcatcgcattattttgtgtcaatacttcattttccaaagaagtctacgaagctatctagatcgctttctgctggtgagaccttcccgttcagtggtctgttattccgctggcatcccttgttgcgaagtctccccaattgccctccttgatgctgcatgctctgcttcatccgccccatcgcggtccccacctgaggttacattgcacagcccttggcgtcgcagatctactctcggccgtaaacgcctcgacccccaatctgtcgtcatcgtcggcctctccggtgtattcgcacccaattgatccatctcggcagcatgccacggtcatgcgagccaatagcaaaaataccgcacattcgcctgaccccggccaaatgcagcgtcgtgaggtcaatgcctggccgggctatgataagacctcacgatagcacagtctggcgaatagaggctttgctagcgacagccgtgggcataggtcattggtcgggagccatcagcgagattggcaggggttgttgcaggtgccctaaagctgaaaaagaaacttgtgtcgtctcacaactttggacgcatcggcatgggttgcaggagatggtcggcgtcttctgcgctatgaagtaggcggattacgcctcgtggtctataaaagagacgacgattcctcccaagtggcaaatctgtaatcccaccttcccaaattctcccacctttccattctcaccgtgccctacccactaccacatacccaaaatcccgatcccgttttctctatttctacgagtggtcccgattccattatatcgtgtacttgctcagcagcctttttcacaatatgtcgagcgatagttttcgcttggaatctttccggccgtggaatcctttccaggacaaagcgcagcctctgcggaattctctcgatatttgtcgttatccaagtcctgtctcgatcactgctacctcgcctccctccaattctagcaactcggcctcgacgaacccaaattttcattttcataaacctgagcgacacccccttcctccccgaccaccagtggaggcttgcttgaatgacagcctaccacaggagataaacactcagcaccaacccgctatgcaggatcagacattatgtgttaaccccggagttcaggcgttcgacttcgaggatattcgccaactgcaggatttaccaagctctggagacgaagaccgtccgatgatctatgataatctaggcgcagagtctcagcacccactcgactttgagtcaggcgatccgggattcgcttgcactaccagtcagcactctcatactggcattactagaagttctgttctgacgagcgagtgttgcgacgcaacaattgatccggcaatcctgggtgattaccatttccgagatattgagcagaccccagcaagaaaagacactgacgttgtggtcccttctcgttcgtcggataaaactgttcgtggccgcagcatgcgaccaaaaatgaaaccaaggcggcagtggtccaaaataaacaaggtttctgtcgtcgtggacaatcgccacgtgaataggactggccggagcactcgagcaaacggccccgttaaaatgtcgttttcaattcttcgggatcaattctcttctctaccggtcgaagagcaactgcagttcttgtcctggctgtttcagggtgctttgtcccaatgcctccatgcttcatccagcgcggatggcgcatcggcattaggttctatctcgggagaggaagaaacctcgactccaccgcctgcgcaaccattcgcaggtgccaacgtggtcgatatacagcatcctggctcctcgagaaaaggactacctttcattccggaagaggatcgccttctggtgaagcttaggaaggaagacgctcttacctggtcggaagtgatcaagcgattcagtcggaagttccctggaaggagcaaaggctccattcaggtgcactggagcacgacgcttaggaaacaactgctgtcttaagctagaaatgcatataggaagttttgtcgatttgctgatacacggtcatgttatttcaagtattgttgtaaaccacccctgtctccatttccaatttccaagtacttctttgcattgcattgcacagctcctaatgttgtagctattccccagcctccttctttcgaacgctgatttatattctgtccttatttttgggcgtgttcgtgcgaaaggtaacagtttcatgtttgttgagctcgaagaaggcataatgaaacgaccgcctttcttaggcctattatggcgatttggaactatgaaacatgtgagtaacttgtgatgttggtttagtgaaggtatgtaccgtcgcaatttgaggctgcaggctggtatgtatgcaggcaagtatcgtcaagcctaacgaaataagaaacaaccctattgagccaatggacgccacccacaaggctcgttgatgcctggcagcagtgaggagcggataatgccagaataatttgaatgtattcgtttcgatatgccatggcctcatgcatattatccaggctctaataacttgggcgtgaatgaacccgagcccagcaaaagcgaagatcataaatgaagaaaacaaagctctgcgatgctcctgtcatttattgattaacaaattatatcaaaaggaaggcagctagttaaacgtaccgaaaaagccatagaaaataatagaatggcaactgttcctacaaacaataaggcagatacgatatgggctaaccagtgttgcaaagtagaaacacttagatactgacagaggtcagtgttgctcttcttctgttttcaccattctcacctcattcaaaatgagcaaaagaagcacactatcaacttccagctgtagcatccgctgagacagatctgaaatgtgattagtgaggaaactgatttcagcatagaaagcaacttgccgtattttggatctgctgccaacagtgccaggaaaacagaagtgattgatcccagaaacacgaaaccacctatcacagcttgactagagatgagtggttccttgctaagcctttgcaagctcatagcgtcaatcgacaggagccagaaggcaagacttgctccgcagaaaattgatgctattatcgacgcagtcagttggaatatcacctcagagtccatttttatgttgacactttcattgagctcgatctacacggtccatgccgctatttaaataaagagccctttacttccctagatctcgctcaatccgacaagggggcgtgcatctgcagctcgttcttcctatgagagacgtccccattatctttccgggttgcgatattgtgatggggaaacgtgaaatagcgatacttcctagtcatagacaatgatcagctgctgaagtcccaaaaatggcccacagccccacctctatcccaccatccattggcgcattggcggtgcacgtcagcaaacttaggcagctataaacttagacatcctctaaaactgtggcccataatactttcaatcttccaactttccaactttcaaaactaaacgtcgacatccatatcacaaaattagccatggctgctatcatcaatcaattaaactccgttgctagagatctggatgccttgaacttagcgatgcgtgatatctctttgtccgggaccgacctgcaaacgttggaaacggtcgctgcaaacctcaaagacatcattgttgtcatcgaagcaaaagcaggactacggaagcgcccatggatggagcaggcgtggaaggacagtgagccttacagactcaaagcgcaatccataattgccacagtgctcagcaaaggacggttgcacaatccagcggtattccgcaggaacatcaagttaatctactgcgggtcacagcaatctgagttcgattccaaagataccaagtggaggagaggtgtggtccagaaaagatgttctaggattcaacaacttagcccagatggaattgtctcgtgggctattgcttatcctccaaccacatggggaccatgctttatgtcaaatgatacttttgactgcctcatagaggatattgagccaagagacaggaagaagtggccggacgcagtatgtcaaacactttccagactgaaggacggggaagttcaggggtgctacagtcttgagcagctcgtgcatagtaagaggacccttggaagaggcttttctgtaactgacactccgttagacctagagaatccatcccagcaagatgaattcactaatcccgatatgcctatccaggcagttcaaacagcgcctcggaaccccgacaacgaacaccgaggtaagacatatcgcctgcgttgccggatatattttgattctttacagagatgaagcacatgttcacaaacgccccaaatacgatggtgatgcaactaccgcaaccattccgtgctgcagttcaaaatagtgcgctgtggaagtgggaaaggtctcagggacacgggacaacagcttgcgtggcaacacttttcccgaaggacgaaacacaggatgtatcattcactatctgggttggtcacaatgatgggtatagactgaatgacacctatggcgtgaagcatgcactttcctcctaaactatccagcagacaatttcaactcccctcacatacgtcgtgtagcccttcggaactgcgaaatttttgtactcggtgacattctcctcgagtatttttcgatcctgcgcgtcttcgttgaatactgatatgtatagtccttgaaatttgattgttctgtcattttccgggtccggaggaaatcgatggctagcaatattccgttcttcgcgcccggcgagggcttcgtcacccttctgaaaagcgtgtcagtcaagaatgaagaataaggatttgatggtgaatcaaactaccatagtgcaactgtagaatatcaagcaagctgatcaacgttgttcaattttggaatggttttatgttttcgatcttccttcctggtgcgacctttcgttctggtatttgaagagagtggggtatgacaacccagattgggcagcaagtcaacggtggccagcgcaatgcatcgcgtatttgtgcgccaataattgttgtagtagtatcccagaaatacccaagttaaggtagctatggcccaaacgtagggttgacaggcttgaatagcagttctgatgatgttcttgggagcaggtcgacgtttggtcctcgcgtaccaagttaagaggatcataagggacccacatcagtcggatcaactcggggtacagataattatgccccgttacaaagccattacataatttttgactcaagtggtagactaccaacttggctacctactacttttacagggtcccgaagctatcttaccactaataacttggctacctaccacttttacagagtcctaaaactatcagtttctaagaacgaggctcgatgtcgtttattcaggtccaaaagcgacgccaccaactgaatgattcctgaatccatccaattgagggtggtattacttcatatgctatgcaccatgaagcacactcccatgcagctgaacaccgaatacgtggggggaagcaacgtcttgctcgaacggtgactagactcagcatccaaccaaccaagcatataaggccccgcgaattcccatgtcctcaaaccttggataacacatcaaaataccgttctctcctcattatcatcacagccacgaataccattcgattctcgtatacacaatgaacgccatcagcgggggtggtgcccagatgtctcttatagatgtcctctttcccggtttcagtatggcctctgcctccgcgcagcagcttcttgctggtaacctggacagctacactcggctcctttgtaccttaggaatgcttgtcctcttcacttgctatgcagtccgctatgttggggagctagtgagaagccacttcagttcgtaattcttcctttgtgatgggatgagtctgacagccaacagcttcgacaatccatgtctcatattatgacgaagcgtacgacatgctagtcgactggatagcccaccaaccgtttgtccgcaatgctcactcagtaattgctcgtgtgagatctccacagcgaacaaccatctaaagccaagaaaagaagaaacctttgacattttcgccttaggatggatcctttcctttttggtataaaggacacctactcatacttcactgcgctgtcaaagaccatcgagaagacatctacatctcctccattggcctttatccaaacattctcaaacagctcgttaaagagtgccgagggaattaccttaataacattaacaaaaagatcactgtctttaagcactgtgaaggggactagaagaaaactaggttgagaccagttcggcccgtcttaacagtcattatagacaaggaagtacaagatgaccttttaagagatatgaaggacttcctgaatgaagatacacagaagtggtacgccgaccgcggtatcccctactaacgaggctaccttttatatagacctcctggaaccagaaaatccagcttcagtctatccctggccggggaatttaaactagatatttatacgctttaactatcagggatttctgacagcaagctgataaagctattttctgagcttccgctgcactgcatcgttcttctagaggacgtggacgccgctaggatagggtgcagggacgactccgatacagaccaagaggataagtcaacctctagagtcaccctatccagtcttctaaatgttcttaatggtatatcatctcaagaaggtcgggtgcttgttatgacgactaatcatatcgaacatctagatgaagcactcattcggcctggccgcgcagacaagaaagtatatttccagcttgccgataagaagatttctactcaactatttcacatggtcttcaagcagacggcagaccacaaggggtcaaagcatgaatgcggcgataaggcgattgagagacttgccaataactttacttccaaggtgccagaccaagttttcagtcccactgaggttttatcgttcctattggagcagaagaactcgccttttagcgctgttactagtgttgaaaactaggtagcgaagacaaaggctaggagccaactgaagagagagggttcctaggtacaagaaggacgttaagaactaggaagagagggcacccgcgcaatagagaggcaaaggggcataacaccgcgacgacatttcgtttatagacaggactgaccaagcctatgtcgccaattggatgttggtttaatatttgaggcgcttcactatttttctggttttttccctgccctttagatactttgaccctgccagtctttttcttggcccatcgatcttagcccatcgatcttaggcccccactctttcagttatttcccatactttcactccttaatttgaacacatttatcaacttcaacctgtattagccagtaggtagcttggagtcctatttggccaatgctcgcgctaagagaagctagatctccgcggaggaacttgatgttaaccacagagccctaatgcattgggcaaggctcaagcgcatattcaagatcgcgaaacaatttgatatggtgctacttttggatgcattcatagagcgtccgattgcctcccatggaagttacaaccgccttgtgactgcctttttttgcgaaaccttgaatactatgaaggtatcccgtcctattcttgaccgccaggctgcagcccgaatcagttcgatatcccttattaccggacgccgacacagcgttgatgtcacctcaagaaggtcgggtgctcctcatgacaacaaatcatatcgaacaccttgacgaagcacttttttgtctaacctaaccctaaccgaataatttcttcctccaggtgttcgatatgatttgttgtcatgatgagcacccgaccttcttgaggtgacactctagcaaacttgtgcaggaacgcataattatcatgtattatgcgataactaagccaataatgtaaacataattcctcccgccccatgatctgacggtatggtcgtcaaccgagtcgactaacgcggtggtctgtggtctgatggtcatcatatgtagggaactgtcgagctagacaagagcttttgcttgctttccccgtgccgacgcgataactacgccaggtattgccagaagttgattcaagaacccgacggcgcttcaataatttcacatcctctaagtcaatgacaattaactggccactgaggtcatcccacaatatattgcgccactcactgtcgttgtggacaactctgtgcgaccggagcacggtcagagctttcttgcgctcctggttgaagaaactggaattctcgttattaattatatgctgaagccgcgttcctgactagctcaagaccatcatctcggccattattttaccatggtaccaatacgcgacctgtggctggaaggatccaagacagatggggatatgatgtccttgtaagctcctgaggtgacgataattgtccgcctccgcttaaaggcgatgctgcttctccactatggtagctttaatgaccacagtatatctgtgtgatagaagggtagctttaacgaggtaacccgtccaaccatagacgtggagttgttcaaacctatggtttcggttttaggcaagttgacagtgaagccggcgtgtgaactcatgcggtcccatggggtgtctctgtccactgtggagtttccagttagggcattctttatctagagggtctcggttaaccatgccgcggatgcaggcaattgtgcagtagggtcgtgtagattgcctgtcttttcgagaggtctgtttgttaccccgactggctcgtgtgctttcgctttccttagtcgattgacggttattgcctcggtcgcggctcgacctgctgtgagtcgctgctgcgatagatggcgaatacgattctttatcactgccgctgccttcggtcgacgaatgctttagagtagacatgtctggtttacagcgagtacgggatcgtgtattatgtgtcttcggctctattttccagtgcgagggttgataattggaggctcgagggtctttacggagagtctcggggatttttctcaatacatccaggtattcgacctcctaggtctttagtgtattatatgccacattatgccactcttgagacggagcttcagcggctagcgcttgaagggtgaatgcaagtacctgaccgatagcggtccggtggaggcgcaattcatcgtccgcctgtacgtcctaattcgggatatatataaaatattgaacaactgtgggattatcctccgggatatagagaaaaacaaaagcctccctggtgtagatgtagccgtattagaccccactgtcgatcatatatgagaatatctgagtgaccacagcggcgacgaggtaggtggcataaaacttaaacgtatcgccttcctggttaatgacatcgcgagctggatctatctggtgtagacctgccaccaattcggggattgttaccttgtgcggtgctttgaactctaccgtatatactggtatttgtcgttcatcagccacaaggtgtacgcagaactggtcggcacgacgattacgtcttcgtgcagtgctatccctcctttttccctgtgccccttttcttccccttcctctgccctacccaggcttagtgttcgcgagtcggtggggtgttcgcgtgccctgaagattcatttgctccaagccgttcttcagcgaaatttccgatgggttcacgcggtcgtaaaaggtgacttggccttggattctaaacttatgtcgaaaggcttcatcatctcgcaaggccttgataaccatttcaataaaattatccaccgtgtctcgctcaaaatttcgaagggacgcttccgaataaatcgacctgttctggatattcgtaacgacataatctatttgggtattagaagggaagagagggtgtgaggtaaaggcagccgtgcggtcgaatttcctccagacttgctcctggagctgagggaaattaagccaagggactatgcgcttgggataaagtctgttcactgggttggtcgcatcgccctgagtcgtgagggttgcatccgtctcgactcggatcgcttgcgataaagagttgtgacagcgatcgagaaggcgaaacagtgtattaggctccactcgccgctctgcctcttctcgcgcctttttctcttcttcttcacgacgctctgcctctcctcgcgcctgtctctctttctcttcacggcgctgtgcctcttctcgcgcctgtctctcctcctcaagctgacgtcgtagatcggcgattgtttcttccattgcttgttgaaatcactattcggtaaataatcgaatgatgtaaatcaaagtcaacatggtagggagttcgctgtctggctcgggagagtgacccgtcaaggcggaatgcgtccagatgtttaccaaccagcttactcaccccttggctcgagtcgattcatgcctaaggcacgaaaggcaccaacacgctttggcctttttaatggagcaacaccaggaactaaatacaaatcctcgcagttcgaactcagcaaaaagccactttatacattatatcgaggtcctaaaatttctgcaagttttgagcgcaaaaagtcaggcaccactttttgttactttggctgattcatacctcacggccagggacagtgaagtgcacgtgatgaccaccttatgtatcgccgtggctaacataagccaacaagcaagaagggcatttggatcgtaggcctggggaatatggtataaaggggaacttgtatgcctagccaggtgaaatgccccgaaacgaagcaacggagtgaaagggattacaaccgtggatctgcgtgaaaggctgagttgacgttagaaacacagccaattttcgcgtcgtcagtaccctacagattagaaaaactactgacgaagacagcatctcttctctctactagtctactagtctactagtcattggagaggatttgttgagtggacgcacaaaatcggcactgcacggtagtcggcctctaccagcagacataggcagcaagcatccatgccccgtaatgcgcagaatcggccatgccatttcgcgttatatttcacccggtcggggctagttccaatcaggtcttagactcgggccggtccagctggctgagctatgccccctcccaataccccgcagaagacagtcaaagaacactcgagtcgcccggaagttgaatttcaggaacacagctttcaattcacggaaaaagatggcgtcttactgcccccgatgctaaaaaagctttcctctttttttcagccagacagcagcatattagagactccctcaaccatcacgtttgccatatctgctcatctcctcctgattatgcgacagaagatgaactagatgagcatctacaagatgagcacaatatttatggaaagagatagctcagttgacaaatttcttcgccttgtcagatcttgcattgccacagccacatagacggttctatgatgactcagttttatcttttcccttgatatatctcatttattataaacaaccttcgggtactgtcctcctggcaacattggccgttttctctccctccaaaaacaggaggctggggcctttccgtctgaagtacgcatgcatacgttaggtgaaatctcggactttccatcttcccgcaccgcccggcggtaaggaacatttaacaagacgcggactcgctgcctttgcggtgatatgcttgctctccaccaaagcagtcattgtaggattggcggtcataaagaccgctcagtcagtctaatttgaagccctcgcattcttgagggcatatggtttattttattggcatccccgaatctccacctagtcccactgatccccacctgtaatacacaacgtacctagtatttcaatgtgttttagagatggtcaaaatgtggttagcgtatctcttaatctcgctgatagtgccactagaccaaagtaggcagcaccatgtctgttatccccctcagtcaccgccatttcccgccattattctaccacacaaaaattatggtaattattcaaataactaatattcagtgtaccgtccattagattcaataatagcctgcaccctccgtggcataccctgtgatagaccttactaaggtcgagttgttgccaggcctcctttgcattaactaactaactggttaacaaagtactcggtagttctagtcgtcgcctactgacaggcactcttccagactatatctgtgacggccaagggggtagttgagggatatcatcaaatcaatacaattacttttcaaggagtgattggcagcgagctggggaaccacgcacgaagtaccgcttaaaacaaaaatggggggagtaacactagactactctgtccactcaggctgcctagtcttctcagatcactctgtccattcaagtaccttatcctttcgtgaggatccacaatagttctgttgcccgacttatacatttgttcatgacggaaatctggcggtacaacaatgtacgggtaacctcagtggtattgagctctctaactaacaaaaatgacaaaaccgcgaaaataaacaatctgtgcggaccatgatgactaactgtaacatatacttttgtactgtatcgcttgtaccatcggtcacatgattttctgggtattttaccctgtctcaaccatgtaaactaaccttggcattcgacagttcactccactcctacagacctatatacgtcacgtgacgcaggatccaactctctggggcctatgcagggtacagcacgtcagtcagtcgaagcccataacagtatcagctgatgctggcaaattgggcttaacgttggtcgtgcttgtcatactcgcggcaagccctttttttttccagtgataaaccaatggccgactggaattcatcacgtgttatgacggtgttatgtttgcactgtttgctcttgtcgaacaatacataaagcccgtgaaatcctttgttgcacttcggcggcatcatttttgttcaccgagatggataacgagcttcaatcgatcattgaactaccaactattgccgacattgaggcatcgaccgatgtccttagtatacgaacaaatgccatcaaagtggttcgagtgaaggaacgcttcgcggtcaaaatcgggtattcgatcccgcctttggaagctgagaacatgaaatttgttgcagccaacagcaaggttcctgtaccaaaggttcacgccaacttcatcgacccagagacccagaaaagatatgtcgttatggatttcgtccctggtacagacttgcagaaattactgccatcgctcaccccaactgagaagacgacgatcagccagaggatcagacaggcgatcaatgaactgcgagcaataccatcacctggctactttgggaacttgaatggcacgccttacatcgacggtgttctttcaacccctgataacaacccaatcatttccgggccattcaaggaccagaagcagatgaaccaaggaatactggagagactgggccaaatgcagtctccacactacattcgattgttgaaagaaatggtcaaccgcactctcaagaaccatcgaattgtctttactcatggagatctgcaaccgaagaacataattgtggagcgaaaaggggtctgctgaggatccacaatagttctgttgcacgacttatacatttttcactccaccccaacagatctatatacgtcacgtgacctgaaatccaactcgctggggcctatgcagggtacagcacgtcagtcaaagtccataacagtatcagctgatgctggcaaatttgggcctaacgctggtcgtgcttgtcatactcgcggcaagccctttcttttccagtgataaaccaatggccgactggaattcatcacgtgttatgacggtgttatgtttgcactgtttgctcttgtcgaacaatacataaagcccgtgaaatcctttgttgcacttcggcggcatcatttttgttcaccgagatggataacgagcttcaatcgatcattgaactaccaactattgccgacattgaggcatcgaccgatgtccttagtatacgaacaaatgccatcaaagtggttcgagtgaaggaacgcttcgcggtcaaaatcgggtattcgatcccgcctttggaagctgagaacgtgaaatttgttgcagccaacagcaaggttcctgtgccaaaggttcacgccaacttcatcgacccagagacccagaaaagatatgtggttatggatttcgtccctggtacagacttgcagaaattactgccatcgctcaccccaactgagaagacgacgatcagccagaggatcagacaggcgatcaatgaactgcgagcaataccatcacctggctactttgggaacttgaatggcacgccttacatcgacggtgttctttcaacccctgataacaacccaatcatttccgggccattcaaggaccagaagcagatgaaccaaggaatactggagagactgggccaaatgcagtctccacactacattcgattgttgaaagaaatggtcaaccgcactctcaagaaccatcgaattgtctttactcatggagatctgcaaccgaagaacataattgtggagcgaaaaggggtttgcaacaatggagacgcagacttcaaagttactctgatcgactggaatttgtcaggctggtaccccgaattttgggatttttgcaattcaaccttgtattgtcaaatgaaaccggactggcttgagcttatcccggacatatttgatcagtacccgattgaatacctaatgatgcaagttgtctactcgtcggtcttttactgatggtacattgggaaaatataaaacattagtcttagtcgtcaaaaaggaaagccatagactctgcattttacattttcttgtacgcgaaatcaacctctcggtctcttttcaacaccccaaccagagagaagagatcgtttaaattaatctcactgtgaatctcacgcttatatagtgagaagcatagattcactgggggaacaggaggaaagaacaaaattgagcttgtgacccagagtcgtggtatgttggaaaatacgttcacctgtagagagaacatattttacaagggccctgaggcaccagtgcgcttgctttcggatccagtccgtcagacgttgtaccttgataaatggacttgactgacttacctcattctaccgctttaagatgcccttttcaaatgccaatttctgaacatctcgcaaccagtctccacaacgataaagtggtgtaccaggatacaattgtttgcccccaagcgtcaactgggctcgaggcgcctcgactgctctgcaacactccgtctcgaatctgggcaaatctgtgtgtgcaatggatccaatgattttcttcgtgcctggaacataagacgccgagagctcagggtcaaaggaacctcttgggtcgtatctcataccctggagtaaattcccagtgacatgatagagacgtcctctttcagacatttggggggcggtggggttgatttcaatgtaaatggcttcatggttaggtgcaccaagatattcggccgtgtaaacactgaaagacatatttaaagagttttgaaatgttgtggtaactgaaaaagctattgaggtctgatgagtgggctgttacgctcgtacaagtctctttatatgttgagcagaaacatcaaggacttcatcatggctcagaccattctcgtcaatatgccaagttggtgttgcatgtgtctacgtgcatagaaggtaccgcgcgccaaaatgcacgtttgacgctgattggtgtacaaatgaaatttttgtgcgcaggttgcatttcacggcgagacgcccattacgaaactgctgctaattctcctttatttttattttctattttcgtacaagtcgattagtttcttggctcttgccaactaagtaattgaaggtggttggcgccttcactagatcacggcccgaaaagagcgctaatttcccttgctcattgagtgcctctattaagaaaatcatccggcttgaagtaacaatatttggattttaggcagtgcaggtgttaggtgaaaccgtagagtgaatggaatagactgctctccagtacacattcactgacctaggtgattagtcattcgctatccttaatggatgtgtgtttgatactgatgacgataaagggtgtttgtttgtttcagcacgaggttacatctgcctttcgcgcgcgttacatagaaagaaaacattgaaattcagcaaatttttgatggaaatacaattcaacagaagattggatttcaactttaaaaagccaatcaattttcagcattcattagaaacccaaaacgaagctcccgccaaccatcttcgctataaggatcacggtataaaaacttcttgtcaggctgcgtggccacttttgtaacaggattaaatgaggaggatccttggacagtaaatgcaaaaatattattagagattccaagtatcggtccattgcggagcactgtggtggggtcaaataattgttcacgtgctctattctgttgtgcccaaccccgcctcgtcgctcgtagaaggacaaggatcaactcgattatctcaaccgaaaacaagcagtgaagcagaactttatctgctccctcaatagctcaatagcgttgctagtagctgttcaatgaatggacctatggcctaccttcgaccggctctgaaaaaacctgagcaggacccttgcgaaaaattaagaaactggcttccaaaggcagaattttcagcgaaagatgatacgccatacatgaggttatatcgaaacattccggcagatcttctccagcctttccaaaaggaggtatggaatttcgttattgattttcattcatatcccatacagctgaccttaggctagaatataaaaaccagcttaatacaattcgcgaacggagtatccccgtgggaaccctacagcactctaacagtgatccttttatacgaagacaatgtaaatgtatctcttatcaatcacaacgcaaatatcctactagcgaccggtgacttaatagaatggagtaggttaatagaaatcttgaattcgtatatctatatggtgacctagagcaaagagactatatgatagtctcctctaagagataggttattgtttaggtaagggaatacctattatttaggagaaggatggtatataatagtcaaatgaagtagatagaagcgctgccgtttcttaaggagctgagaagccggaatgcagtaaaataggtatcttagatatagtattaaaagatagaagagaataagaaaatatttctatatctacaaaatccggaggatatattaaatatagatcgcgtgagtctatatattctattagctatcgagatattaactagttaacaatcaataaactatatgagttatcttagtgaatttaggggagcgaatatactgtctaatatccgtggactatatattacagatctagactaataagttgaagtcgatggttatatatcacttactataggaaacccttagggcttagattcctgcttagggaagctctctcctagtctataggagtcagtattatgttaatagatcttattacccggaaggcttacctaatagatttagaataaaataattaggatcttctatagaggttgtctgtagttatactatattaatcgatagaattagattaggagataggctgtctagatttaaattggtcctactgttaatataatatcttttccgcgctttatatagtaagtcacttataggctacgagtcccttttggtttaggattctaccctaaaatcagcttatctatctagggaaaattgatatataggaaagaagagcctttgtctttccagtttatctatagtatctgaaccaaatggatctaggtactattttataaacgattctagagtaatatcaaaattgcagtatagagcattatatatatcggaaaatctagaggctaattgtaagtaaaaagtaataagcgaaacagtttatagatatactagacacttttactaaatatatatttaataatatatagaacagagagatagtttaaatgtaaactcgctaggcttttcttatattaatctttttttaggtagtctgtaaatatagatatcgattgggttactttcgcctagtaccttaataaagtaaaggttggggtaactagatctatatatcagctctatataaacctgattagcaagaagcctaacagtaaaataagatatcactacttctaatatcctaaccgctctctgcttaaagccagttaattacctcagccccctaagccacactataccgaagttcctaaagatagttagctctgctttttgaaatatatcctattatctagtttaccgattttagatctacactaagacaatatataatatgataaagtatacctagtaagaaattctaataggatactatagatttcgcctacttcgcattgccggcgcatttttgtgtaagcgaagtataagccctaagagtttgaatgatatctgagtgccgagaatagatagttaatattagggaattactgtctcttaggcaattttcgttttagaataatgaatctagaatggaaatttaagggagagatatagtactagaccacttttctatataagggatcctattaataaaattttctaaaggtttcttctacgtttcttctgactaagatgaacccgatagcgaaacccctttacgcttggtcgctgaaagggattgagaaacgggaggccagagaagataagataaggtgatttcgcgtggaatttgagattgtacaaggatatacggtgggacgtaaggcgtctattctcttagtatctgccgaaggccataaatctgcctctccaaatcggcaatatagtcggaagtattgctgggttccatctcgcgctcaaggaaagatgaagtacgatgtagaatagatggttcagaccactgggagacagcggggaaagcgagttaacacgaaatctactaacaaagaatgattgggcgtgacaggggtatgggctcctaacccatacccctatcacgcccaatcaattgcggggcagcatctgcccaatatatgagctcacatgcacgtacgctcctcttttcgtgtgccaacttcttcttctggccactatagatacctgtgtcgacaaagccagcatatgtaaggccagagaggcgaaaatggacttaagatacgtggatggggtatgatactagtgcttttaaaggtccatgtatgttcgtgcttgcagtctggtgctaggctgccgctagtagcttacatatgagctttataattgatggcatataaaattcgagaagtattgatatctcttagtggcgagaatattatctgcttgagcctacctaaagtttggtgtatgcttttgagttgtatatctcccctctttacctccctgggcaactcgtatgattctactcatgcataggcggacccgctagacctgaaccaagaaacccagctgatgtttgaagccttctatctctactgacgctttgaacgcaaattattctatactatcagaagctggctgtccaaccgacctcatgtactgcctgtcttctgaatcgctctggtctcttcttccgaactggatacaatccctctggatatcagaaggagaacaaaatagagaatgcctggatcaaactgtccctactgttcccagcctgtatacgagaactgaaccagcggtatataagcttcaaaactcggaagttgtatataacgtcacaaagcctctactagtttgcatttcaaaccaaatagagagactgccacggacacgcactaaatcacttgaaaattatatttgtgggttttcctgtaaactgtaagccttttctattaccttctcacattttacttgctagcaacccgaccctaagccatctctatgaaatttgatgacaacacagactgtgagactattgtgcttcctggcatccctctaggcattgaatttgtcaaaggcaggattacttgtatgggagagaaacacctatcacctgaatggtcaactatgtgtttgaaaaacaataaactggctgtgatcatgttgtcaaacattagtcaaggaccgagtcttcagtaagtactcttctttattcttaggcttgttgaagtaatctaattttcgatagccggacctctagtgactgatcggccagtgtggaaatattcccggcactttcgcggtataatcatatggctaacttttgtggccagatttataagtcccgatataaatttcataaacagaaatatcacgatattctataaattactctctaaattggatgcctattcttcgaatttgagcggatgtggaatggaatggaaacctatagctttagcactggcgtttctgcaaattcttctacccttatgagggacttcactaaagtgattttcctaataaaatgaaatataacttggcagattattgactcttggatagtccctgatccctttccaacgacagtagttactgttattctagggtggggaaaggagtagcagctggccaatgacataagggcccagtataggaaaatgattggctcagcgttactctttaacctaaagcaacaatgccctagttactagctgaacactatatagaaaataatccaatcatcgtaaattaacattcctatcaatacttttggtttagatattacatattttggcaagattggtgccggtaggcgattagtgaggccatcaaataatggccttgcattttactctgttcctagcccctacgaagtacactattccgcaggggcttttgagctttacacagtatcccaggaagccacatacatcagcttgtggaattaaaacgatttctgcaatgtagcagcttgtcaaggctattatggaatgtcaaatatttctaggatgtgagtagagtaggtacccattcaagtatataaagacaaagacctctcccagaaatctccgaaagaaaagcaagcgttagatcaataaaaatggaattccctttttgtggtacgctcttcaaaccactatcgcatcattataaagctaacccaaggacccccagatcctgatatatccttacatatatttagacgaatagggccacacatctatgacgttccagatggtcagaaagagtatacctgctaggcgaggctatattagctaataacctacagactttatcataaaactcgatgcaacgaattgccctatgtacgagcctgtcgataacaaattatggatcctgtgcgccggaagcagcactactatatattttacacttgatcggatatacgaagtccttctggaatctgagacctgtaaccatatttgggatctattcgaaaaatcctttttattttcgatttcccggacgtcgaagatagaagaaatatgcttggctaagccaggtgtctatatagtccctagcggtaagaagcgtgttatgacttgttaagttagagatagaggctgatatgcgatagacttgatgataatgcgcacgaacagataggcctccagaggaggttattcttataaacttatttcgaaaaaattacatagcgattgtcaacgcctctttgcgcttggccgagacggacaagaacttatgctcgctgagatatacgcgggtctatcgattcttggtaaattctcgaggtctatactcctaggaatgattgccatcatgagggactggcttcgaaattaagagttttctattaccgatgagggggtgttgactaggcttgtcttacaattagggcggcctgttaaaacccagggcattgctaatcttgtgaaaacgtgggttgtctaaggcgaatatcgtatgactcaacttttacggaatggagactattgggatgccaagtgcgaaatgttgggttctcactattggtagcaaccgacgggaaccccataggaactcttgaatgctttatgttgaaggacgcccttttaccaccgctctattttctttgatacttcacattagtatatacaattgtatttctcgttaccttttccccccttacctatagaagaataggcggttcgtgaggggctctatcgggtctggtggaggccaatcgggtgatccctcacgaactagagcagctttctatcttctatccgttgattcatgtaacttatatgaattattgttactctacttggccatagagttgtgtctctcaagagagtctatcttagaaacctacgaatatcttatagattagacaatacgtcctagccatatatctatgtataaagctacactaggttgcctttctgtctaaatacgcttgtttttatcatggtcaagtaattgctgttatgctatgtgcctatccgcaccctttatacttacctctattgaatgcagtgcgagagctagctatgtaccctgtcacgagcattccttaagccctaaatagtattcagaaagccgtagctatatgcttgaatggtaagtcgatagtaacggcagtcctagctagtcctgctccgtaaaactatgtgggtattcacctaccgggacattgcggtcaccaaataggcgtggtagtgattaaaccacctttttataatttggcctaactcttaagcatcttatacaccctggtaaactggtggtgttgcaaagctcggtaagatggtttatgactgggcagcgctctattctcctgtggaccacaacatatatagtcatgctgaccattatcggaaggccatataatcctaaaacggtatagctcggaatacataccctatatagacattatatcgtttatggtgcccgaatcggcctgtcgaggccacccgttatatcagttggttaagctaatgaaccaaagtttgcgtaataggcccatttaattagagtaattctatattgatgcctatttcgtaccttttaccttgtacctcgcacctagcctttttggaatgggggtggactataaaggtgatagatagcccacccttttcttaatatacccgataatcctttagcatcgttgctcataagatctgtgactccggcctaagcttccttcagagtgcgtttaagcctgctctgttatctcgctgatcacttgttgcgagtctcacattaggcgcttagacttgtcattgtaagtaccttttttgatcattcccgtccatcagcttaccttgtataatacctagccgaaaccctatatcgcaaaatgagtaatgatcgaattcccgcacacttggataccctcggaagcacttaatatcaatttacaagcctagtagagtgtgatatcgatgaagcaattcggcatagtattgtagcgcttcagactgctattgattctgctctcttagagacccttgggatgcagctagatgctcggtaccagcgaacacaaaatcctaatgatctcaatgcatcagtacggtgttatcagcttgcgactaaaacgacttctgatttcgactatgcagcacgcctagattgtctagtaaaattgctcaatgctcgattctattgcctagcctaaaccctacgttgtaaaacgagtgaggatcagctttccctacgcttagacgccctcgaaagcagttctcaagctcacgatcagcctataaacctgacgggtgatgtcgatgaagcagtttggcttgactttctagcgctttaggccgctgttaatcctgcactcttacagaaccttgggatgcagctggatgctcgataccagtaaacacaaaatcctaatgaactcgatacagcagtacagtgttgttagcttgtgactaaaacgacttcttatgccgactatgtagcgcacttaaatcgtctagtgggagtattcgaatctcgattctaatacctagaccaaagccgacgtcgcgaaacgagcgatgatcagctttccctacgcttaggcgccctagaaagcagttcccatgcttagaatcagcccacaaacccgacgggtgatgttgatgaagcatttcggcttggctttctagctctttgggccgctgttgaccctgcgctcctcgagaaccttgggatgcaactgtatatacgataccatctaatagaagatatcgttgatctcaacttagcgatcgactattcttggcttgcgactaagatgattacttacgaccatcctaactataaaatgtgcctagatcttctggcgggactactcgatgctcgattctaatctacgggatttttgcctgaccttgattgagcgattcaacttacttgtactgcataaattggcaggataaatcaaaacgatttggtatggtactggttcgaactcggggaaaggcttggaagacggtttggctctagaggaactatcgttgatcttaacgatgctatttggtacctttccctagcggttaaagagatcactgaagattctgctttcctcgtcgatctcttagtcgagctcgcttttaattttaatcttcgatacgagatattggcaaagatagaagatctcgaatcggcgatttcgctatattaacgggctctttaagctaccgattatcaagatgaattacggttagattgcctgtgtaacctcggaagcgacctggaagcccgatatagacatatcggagagccctctgatctctacagagcgatcgccctagcttatattgcaatcagtataatggaggctatcagccctaactattatttgcttagggattgcttctatgagctcgggactaagctcggacttctatacgaaaaaataaatacgatagatgaccttaatgaggccattatatggtctcgtaaggcggtgggtgctattggggcacgtattgaggtttttcgccatatcgaacacttgttaacacttcgttataagagaacacactaaaccaaagattctgaagaagcagccaagtgggcagaagaagtagtcaagtgggaagaagcagtttagaaggatgggcctttgttgctagctagttttatgatccctatatggaggcgtgtttttatagatgaatataaataccacgtcggacgttaatttaagtagtaaaggtatatctctttgggctccgttggcgggtgactgcatgacgtctgaaacgctgctttatagattgaagcataccagtagatctgcgatatctcctaatctaaccccgggagtaaggtacgcattgacagggaagccccatactcatggaaacccgcactctgtagatggctatgtccgaactaggcaccattgatgaatataaaaaaggggtaagtttatatatttcggtatcctaggataccgaaatgagatcatatgtcccttggcacgcaagccaggccatacacgggtagtcaatatcggcgtcctagcagggcatcatattaaaacatatactttagcggctaataacctattattgaccaacaaagcaccaggacccttaagcatttacgtaggtaacgctacgccaaaatggctcagtagaagagggaactatagagtttgcgaatgggttagaaagttagtatacgatttgtagggttggccttccattcgtttaggttcgcgagagcttcctcagtgaccgcttcagtactaaaaggtcgccataccttaagcgcaatagattctgtggcgggggattccccctacttttagacatcttatagtaagaacttctcggaaaacttgcctataatcagcaaatggactatagccttattaagggcgggataagattttacggtaggagggttcctatatagggcgtatgcaatcatagtatccagtaggaagcgggaattgtttctatatacctattagttgagaggggatgatactatactaaaagaattctcacatttttttgcctacttctttactataccgaataagaaagctagggctaaagtagtatatacactactactactaatacttactgattttcttcttattatagaaagatttatacagttttcttttcttaactggtattaggcctcttgagttataaagtgtactgataacatttctttttagagtagtctctactgtaccctattgacatttacactcaatttctctaataaaaaaaagaaatagagaatatcgagcaatatgtagctttatattatatatattattcttattatataggtatattaaataggttataagactagtacaattgggcttttaagtagtatttaaggagcttaagttattctaggaagggccgctctagaaaccagagaccttctagatataggagtactgttctaaaaaggtagcgaggttatatgaatgaaggcgttcgccggtatgctagacttccgttagctattataaagttagttaggaatataccgattctagaatattaggttcatttggtttacaatctttaattactatacctggttgctccggctcctctagttactctagctcctctggttgctctagttcctctggttactctagctcctccggttactccggctcctctggttactctggctcctccggttacttaggctcctctaattacttaagggtaaggtagggcctaaggttcctagaggattagtctaattaagatttaatagtaagagaaagcttctacttagagcttgcctaaaaacccctaattaataagggtaagtaggatatatctaaaagcttcttaggctgcgtagataggctattattattaagtagagagatagatttagaaatacgaccttagggattcgaggttaagttaaccgaattcttatctttactcaaaaaccttatagaatcactaaaatcactaataactaagttaatatctaattccctaaagcttttattcgaaattaaataatcattagggttactaccccttatattactaggagtatagtcggcttattactatggttctaataagtattgtttaaataagtatcgtttacttgaggtaatatcgttagagctaattaaattaatagtagtaattttgtccttattgggaatatctttaactattagctagggtctcgataaagattatcggaagtatttaggtattatacctcttaatttaatttcctctagtattacttttattaacctctctaatcgcctaattattagacttattaggttgactaaacgaatatatatcttattctttatatattagatacctaaggtttttaaagatctaggctaagttaaggtatattagtggttattgtctaaatcgatagtagagttataagaagttatatctaagttatttaataagtttatatttaggctatctgggagatacttatcgaaattattaggaaaagattgattataggtatcgatagatatatctagaaaataaaggtaaattaagttaaatcctcgagatattgtatttctaggcttctttaccagataagttttagtcgttcagttagaccaccctatctaataatactataagatagccttaatttaggctactatctagggccgataaagaaaattgtctagagctattatactttaccttataattgattaaacagtctgtattagcttaaatctacttataaaggctaataaccgtttcgataggtaatatcgactaaagtttataagagatatagactatatctagaatctataatagggttaataagcgttaggtcctaagtagagttaggcctacctctttctctaaattttctctaggtaagaagttaaagctcccttattctctatagtgattagcctaaaggaagagtcagatagtataagttctgattaggtagctagcttatattaagagaaaacttgatctaaagtattttaagggtaaaagcttctaaagaggactaaggaattcgatagtaaataataaatagatttcgagagtaaaggaattcgatagtaagtaataaacggatttcgagagcacttagagatcgctaatatactttaggggaggaggggagtaacgctaactgtaaggataaagtaggtactactctttcttagcttacccttagcttaccctctgcttaccttctacttaccctctacttacctcctctgattgtaggatttattatattcgtaaagtcgaaatatataggatagaagggtttgtataatattttataagtggctaagggtataaaaggaactttacaataatctaacaaatttaacctctatagttaaagtaaataactatattctttagtcttattataagttattaaagaaaggaaaaacgatctttataaattaattatataggattagttaaagctgttattatataactagtattatagactaataataaatattaatttatagtataattatagggcgattaaagcgcttagtaagcgcttagtaagtgcttaggaagtaaggcagaaattattcctcccggtagaaaatataaatataccctaggacctggttattagaccttatataagttatatagtactatctggtaggcttagtaggtcttatcatattatttcctaaaatagttatatatattaataaatgtactattaaggcttacttaatatattatgatttaggaccacttaataagcgacctttaactactattataactaggaactactaggtttctactccctactcgttatatataggtaactgttgagcgagataagagcttttatttgctttccctacgctacctcttattatattaaagtaaggaaatagataccctttaagaaatattattatagaaattaggtagattagttgatcctagatatatattaactattatatacgataaacttaataagtattaagtaactaggaagttaacagttcttaagggcagtgttagttcttacagtcctttccctttatatgtatatcgaatatgaagggagttactagctaagtgttttacttattcgaggaaatcatattacttaattatatatatatatataatttattaacgcccagcggctgagccgagagggcaactatcactaaactactagtacatgtatgtgcttaattatagtgtgtgtgtgtgtgtgtgtgtgtgtgtgtaattcatttacactgatccctcgtcgaaataatatatagcctaccgctactatatatatcttcctatatatatatattatataccacttcctaagcgaacttagagcctcgccgaggcctgctgtggcctctatgctatcgttgtgtttatactgcccttatagtgcgcggctttgaaaccgttataatacttcagcaaaatctaagacagcctctactatcttggtttgtgatatactgttaatcttacctcttccttcttctcctagtctatctaatagtatcgatatactattaaaagtatcgctaaccttaatttatagctctttcctcagttctcttaattataggtaatctaataatacgtagtaaacgctttcccgtttactacagatatatatatcgttatctcgaaattagaaagtctttatatatattaataaccagtagtgtctagtttataactgtatgaataagtacgcttaatttctaggtagggagccgtagagctatttagtatacttggctggtagtatattatcgatctaatatagatatataccggtgcttaagccgttctattcgttcttctattaggtatagatcccttgcctaatatatactctcttacgtaatagcaaatagtaaaacgggtgagttttacccggtacagctgtctctttagctagtaaatcggtagcgttattccctagtacttcgcagtatctgggtatctactgtagttatatcgatatactataggtcttagtattcttagctacttgtagaatggtatagataatctattatcctaacttattcctaggattctagattacttatagggctaacttgctattactaaggatagtagtagatcctacctataagtaggatattctctagtattagagagcgaccttattaataatattaatagtatataggaccctaattagcttagcggtatatactaactaccgatctataggtctaacctatacttatatactatcgattatttctagtaagttatttagtatagctactgcagtacctagatagccttctcttcctaaggtatccgagtacactataatgtccgcggttaactataccgccttagccctttctattataatctccctatctaatttaatcttaatttctaagaaggcttcttttcgctaaggtagtagtagggttagattaatcatttcgatttcctatagtctctctaagtttatggtttttaaggcttctgatagtaggaactaggcaaataatctataattgttatatcttctctaggtttaattcagggcgttctatataggatgtttttagggtagggtatatagtctagtgatagtattctatatacagtagtgtagacaaaggtgcgttagtagtatatatacctctatattaagtatagttattactactattcgaaatatagatagaacgtagataagcgccgctcattatatagtacagaggtattatagataggtcttatcttaaagcggattatactagacagtcgatatatagtcgataactagtataacgtacactttataaagctattatatttactctagacagagttattataagcccctaagcgcgatattaaccttagtagcttgtttaacggcttattgtatatattccttctactgtaacttatagtcgaagattatacctaggaatttagtagttatagatagtttaatagtattactatttataataagctggccctagctctattctttcctcttacgagtaatataaataagttcggttttctctatagtaaagtaagacctagtttactaggcctaggcttcgatctagggtatatctttagactagattttagctaggttctcttcagcgctctagctaactcgctaatagaagtagttatcgataaaggcagataccctactataaaaatcgactagctagtcgactaggtcgcagttaaagaatataaagaggataggtaagagtagagagccttatataagcctagctttatctagcgatactaccttagtctagtagttattgaacctaatacttacctagcgcccacttataaagcttataatctacttctaggctactaataggatacccttagactagaggcggatatctaggcttatcttatttaccctattaaaggctccctttaggttaaaggctactagtaagataaccttctgtctatattatacccggtcgattgtattagtaagtattaggagggcttactcggttatttgtcctagacgtcctctaaactaagtatctagtagaagactgtagtactccgcgaagaaggatagccactgggctattactacttctaataacttactaagtatattaagtagcgagattaggtagtaagctctaggtagtaagtagtctactttcctaggcttctgtaagactatgattcgtatacttctctatcgctataaatagtatcctagttcaatcgataatgtaaaaatccttataataatatttctaagatatttctagagatatttctagattaatataggtagactatccttacctagtactattatacctttagtagccctaagagatcgatagattttaatcttagagattggatgctattggatcttagttagggtataggcaggtacttcctcttatatagacgctatagataggaaaaacgagtctataaatacctaagctttctctatattattaactagctctatatcgctaaccttaagggcaggaatatagccttaggaatcttatggttttatataaatcgctgccttctataatttcccttctcctactttatctaggaactgtttctaataggatatcttagccttcttaatagtctgagtctatacctactgtgcctagtatatatcttcgaatatagctatagtgtgggtattagcttatctaatcttagcgcagctctcttactacttatattgtaggcagtttatatctttctattaggctttaaggttggtagtaaactactgtttagagtatagggaaggtcttatatcgggtatatacttattgactatattcgctattatacttataagtctctctataactgtatctagcgcctcggctaagtctagctccctaggttactcgaaaagttcctagatctcctttctaatcttctcctagtctacttagtcgtatacctttcttattttactagtagggttatattatacttagaggtactattctgaataagtaccttagtaatctaaattatagttattgtaatagagatagtatttaaagagtaggtctaatctatttattactatctagttaattatagaacttctccctaggtagcttaacgactagaaggttgtagttccctaagggaggtagctctaaaggctataattataaaagaaattgattagttccctagtatccttaataaattgaggttaaatatggttacttccctatactaggtagtagcgattaaaatctccggctaaaataaggctaaaggttctactattatcttatataatattttaaatagtattgtagattaccgataaggtcacctctgccgatactctattaggtatatatatcggtataggcagaatatagactaagaagattaggatttaggagtcggctatctagactttaatcgctattagatctgggtaattgtatcttacttattagtaagaggaggttaagagtttgcaattaatatagataaggctttagtatcgaactgaatcgctttctactataggttaatagagtcgctatacgctatagtttatatatattcggtaggcagtgattgacagttcttagataaggagtatatctagtttctagctctaatagttattaataagagcttctatacctaccctcgattttatagtatttagttatagaattctaaggttattatctaatattataataggggtaccgtggctagtatcgggtatagtaagtctctagtcggatattccccgctatattccaagtagtgcactctaatacctaggggatatctttctcgcttatattagccgctatagtggctatattagggtatctctttatataaccatactagatagctgaatccttggtatcggaagtatcgtttctttttaatcttatacttttccactcttctaatatactgttaatcaattaataggctattatctagtatctattctactacctctagtaagtcgaattagatacctattaaggcaaatgttcctagttctttatctcttttctttagctaagctatatctttaatttgaaatctacggtcggtaagatcgttcttatttacaatctttttaatagctttggttttcctatttttgaggtctaacctaaaggttaggatatagtaaacggcgactccgaaatgtagctttactagtctaatatcgttacctagctcggttagctactcagtattagtatgggccgtttcggccgatacttggtttttaaatcggatcatatatctagttttggtagtactaatccctataacctatgcgtcctaagtagatagtgtcttcgacagtgccgtcctaatataggcgttcgtagctgggatagggaggtagtagccgaacgtgtctctgttattatctatacctaacgctttagtaatagatcgctaggtactgatttggatacagttcttatctttattagtttatcgctaggtctcctagggttgcggattatccgtactggctgtaacggccgcctataattgtattagggttagagtgttcctctcctttacctacgactatagcgctataatctcttcctatagcttcttattctgagtttagagctcgttctagttatctttcacttcttttagttcggtcccggtagcgcgaataagtgtggtttgctcctcaatggtgtattgcaggtatacgataatctgctaaatctctctagttatcacttgtccagtgctggttccggtattagtcagttccacgggttctggggccgcgtgggtctgctcgctttccactcgtgtatgtctcctggtccggaccgtggtcgttagtataaggttttctgttacgacgatccctgtgcctcttcgcgtggttgtggtggcaaggggctcgggagcccccgtgggtgggtccgccattcgtctggcgttagctcccgctcggcacacaacacaataatttatatcgcaatagtatcaaccacaacgtccgcgcaatagtcaaggtctctcccagctctcgaacgttacagtccgccaatttacagtggaattcgaaatcagttttaactctaaactcttacgatttaattcccggaccctaagtggagacacgctaatctaattttagctcttcccctgttaatccatgtagggctgtattgtattcactggtaaccacaatgagtcattgttatagtaccgtaatttcttgtagaaatcgatggaatccatcgtgcaaacagatcaaacaaaagagaatccgaacaatctggcaagatcttctttcattctctcatgtcttgcttgggccatttgtcacgcgcagccttcgcccacactcttttgcatcaaaaagaaggctctagtgactccatagagaacttatcctggtacgcaacttgtttctctatagctctggcctctgctatccactgcgattctcattcgttaccaagtcctaaggaaatccggtactcgggaagctgacatggaccctcccagaactgccatcgtactgtagagatgacacagagcccatatcatgacgatttcatcccccatcccgaagatcctgtaacatgggaaaacaactcacagtacgctccaatacctggatattgcggtagtcccaatgcaacacggttcaactacagtccctccccctctgttgtgctagaagatcagtcactatcagatattcttaggctgctctagttgtctgaatgggaagaaggaagagtatacgacaaggacccgccgacctatatacactaccgtatagagtggcgtgttacagtcaacaatcgagaggtgtcaatggacacggaggaagatcttgttttggcccctagtgccttttggcagctgttcttagagaagaaattagagaaagttcttcgacgaaaaattgcccgtcatcgtccggtgagagctgatgacactgcgattgtcgttttagtgactgaccgaacccaacgcaattcgactaaacgattttgatgctgataccatttgtacccccatcgagtagcagttttcggtgtggtcaggtttatttctccttgtgtaaattacccacactgaagattagtgttaattacgtagacgatcgtcactatcctccagccgttggtcgaatggagagaaaagagaaaaatcctctgtcgcagagaaaatgctcgaagagagagccgctcagcttaatgctgagtaggatgcttctggagaaagacttatataacgcagcgtctataacctgatgcggtgcgtatcctcgacttgcccattaggcccatattgttgttgggtggatccactgggaaaaaggcattaccaactaaagactcgtcatagcgagcggctcgttacccgcgtcgaaaaaggtggggtgttaggcggatacaaagatttgccagaaacagtatgcgaagaatcataaacggaagagcaacagagacaggaaaagaacaatcgcaaaggaggacatgtgactggaaatggagcaccgtatcctaccatcaacatcaatatcttaccctcgcagtcttccacctctgcggctgcataggtttctgctgacttccagtccatgcaatatccaggcccgcttgagatccctggacctagggatgaaatatccaaggaatatagcgaatgtcaagtgtcaaatgtcattgatgacactctcaaggctgcatttcaagatatctgtgacatgatgatcgacaatggtcctgaacttgagcaggtctacaaggatcaagaccaagaactctttattggaagaagcataaagatactatacttccagaaatcggtgtcactatctacactgtttcatcatttctccctgacgccaagatgcgcagggctatatttgagggactactggaatattgatattcaaatatgtatgaatactatttgctacgatcgtgtttttcacagcagcttcttgtaagaagtataaggaatctgtgcctacttctcaatacaactccggatactgcagttgctcatacattagaaacaggccacaaagtaatgatttgtatttagcactatttagtagaactcttaggctgtcggcggttatcgcgtacgtaaaccacagtaggtaaaccacttcgagagcaccgtcggctggtttcaaaaatagatgaagctgcgactaaatcactgagcttgtggtacccatatgtgcgagagtcaaagtcaggatatttgtttgtgaggagttgaccgacatcagaaagcttagcccatccatcgtcatcgcaggatgcttctaccgttgtccgcaactggtctgcgaagtgtttatcttcgggagcttgtttagttgctgatgaattctcaggtgcgatcacactatcagcatgaggtagaagctcatcaagatgtacgaggttttcagtgtagataaatttatcgcaagcagcaacgaaaggcttaggcgtcctctgctcgccgagtccgtacacgatgagtccggactcacgaatacgagcagctagccgggtaaagtcactatcgcttgagacaagacagaacccatcatatcggccagagtataaaagatccatcgcatcaatgatcatagctgagtcagtcgcattcttgccgtgggtatacgcgaactgctgtattggttgaatcgattgttcaaggagcttgtccttccaacccttcagagctgggctgctccagtctccataagctcttttagcatgagctgtaccatatttcgcaatttcggagagaaggtcactaagaagagaagaccgcgcgttgtccgcatcaattaggactgcgagtttggtgtcaccaatcattacggtgaaagtgtatggaataagatagtgacttcacagctacaaaatagatactttatcttcctgttgccatcacgtggataaatttattagttttgttcttataaacaaaagtcatgacgacgtatatacgttattgattattaagagtgtaagggttccacagtttggggcaagtatagcgatgagtgtttcatgcgagataacatggatttaagtatcgctggtcgcggtgaaattgtaatacttgcataggggacacaccaaatggtgaccagcctatgcgcctgaactcaacccttttaccacatccggagtcatctacgtaaaccagctgatacgattgaaaatccgataaatcatgcagataccattctcgtaaattggcatttcgctccctcgcttactgccgagtgcactttgtagaccaacctttggcaacaagggctcgtctgatgctagaggttgtgactagggtgcggaattcatcctagagggaaacagccatctcatcgaggtatatatcaaccgggcttttcagataggtgttcgcagagggcttcgatcattatactgttccgtattctgtcctgcttctaatacgatgacataactagttatgtaccgtgctttgtctgaaagcatggacgtgacagggcagtgccacctgatcccacctttataataaagaccgagaaagccgtgtaatatggttactgtaactggtaattctgtagatagtcgtactaccactcctaagggagtctcgtttcaaggagcgattgacagggaagtcacgcactaagtaccgcttgaaaacatatcctggggagcagaaaggcgaggggttctggcttagcggaaggtacttaccgggtaatattcggccgatccgagactgagtattggactctatacttacgatagttgtgcctgcagacttgtaagcttagtgcagcttcgctttaacactataccttatttgtaagggccgaggtagttgagcgactgctgccacggcctaccgttgattctcagttaattaataatagtctcttaattagattaaatgaactggtctataagatatcaaggcctacctaattgtaagttcaacaaatgttagtggaaaaacagaggtggtgatactgtagcaattaaaattcaagtgtataaaataagggccgtccgttgaaagtggtaagaatattgtttagatactgtcccctctaaaaaagaaattgggttgattgaataggattggttaaacaatatcaccctctctacctagatataaggtctgtgcattttcctaatcccgcaaaacgacaactatgtcgagtggaggcaggagatgcaaaacgtcttcggttttcgtgataaggaaatctattttctacctgttaaattagcgattttatgactcaaattcccatggtcacctatatattccaaggcgaagtgcgctccttattcatgtgcatcaacaccacccaacttattatgtgagccggaccctcgaacttgaggctttttccgatgataacaccattatgaaagccatcgtaaaggttcatttaatttcaatacctagctaagactgtcgtgtactaaccgaaaatattgcgataagcgcccaaccgctcgactaccttgaggaacgagattatccacatgactttcccagttatgctgttagacatacattccatcagcaggcctctctctgccaaactcattcgaaaatttcttatttgattcggcggctaacttcaagtatttgtagttcacctggttgacgtcagcctcagcgagagcgtgtgcaattgcagcgacgtttttgatctagttcatgattggtcagtaatgagatatatagtgccactcgaacacctacctctcgtccattcagatctaaagactccaatcgtcggagttcgtggtcctcaacaatggcagggccttgcatcgtacatgccttggacagaaaagttgaccagagttctctgcgaaactctcttgttaaattctcatactcaatgatcaaatggatccggctgagaattgcgtcatcaaactggataccccgatttgaagtcaagaaaagaattccttgataatattccagcttccggaggaaaatggtcacaaggcgattgtgggtatcgtggtaagatgtacgctgctccatgaacgcgtctgcttcgtccaagagaagcacggcattaaagtgtttggcgatcttgaatactgtttcaagctattgctcaagcgcattggaatccccgtggttgacaacaagttcgcctacagatatctggaaaaatcagtgacgccaaaatcagccgagctggatggttcataccgaatagagggggagcttgaaatactccgaggtcgcctcaaccgtgaaagtctttccgactcccggtgggccactagcacaagttaggtggggaagacttaatagcatagacgctttgccgacatacttcagaagaatgttgaacccttggccctttccatcaattacgtcgtcgaacggtaccgtcgggatcatccctaggcgggttttcgccaatgacaagaggatggtcttggtctctgaagggatcttcaggcagtcgaacgactcaggtgaccagtccacgtctctaagagcactgactgcgcactccactggaatcacattagccagacaccaaaacattgtcagccatgtcacatacagaacattttgtccttaaaactgaaacagcatagtattgggcaggagaccagtaaatccgcctcgctcagcttttgtgcatccacaccgtctcctcgcattttctccttctctcgctcacggtcctccataagcattgcaccaatgtcaatgactgaaattccatccttatctttgaccccaatgtcgcggagtgacggtcgggagtaatttggctgcatttcatggaaaaatgcggcgtctactcccactcgactgttgatattgaccttgaaagccttgcccttgttcataaagaatgcgctgccttcgcagtgtcgaacatgtgagccggccaaattccggaacttttgacccctctcgaccaaatctttccggacttgctcgtgacttggatggtggcagagagggaaggcctcaaggctctcgatcggctttgatcctcagaacttggccactcgcagaaagataccggcctcgccgaacttgaatccattataatcaagaaatcggcactcgagattcaaccacgtctcgtcattttgtgtcatctcttcgcccgcgtcgaatacggcacatcgtggctcttttgtgccaatgcatgtggtataaacatggcaaccaggcttgaaaagcgcccaaagaaggtcatatgtaatatgaccgtgctacaacattgattcgagacgctgcaaagtagaagcgtatgcgtgcttgaggtagttgataagcaagaggagatgctccgcatatgccgactcatggtctgaactgctatccatgttttccgcacatctgtcgagctctgggaggaaatgaaaaaggaaattttgctcgatctaaatccacgtcagcgtgcttcttgatgataatactgtcttatttaccgatggcttgatctccatcaggctaacggccttaatgtcgtgcagcacgtctcgcaggctatcgcgtaggccttccgacttgatgtctatgaatgacactatctccttagaagtccggtctgatcatactattagtaggttttcggtccagtatgcaaaggtcttacgtaccaacacgttcacggacaacgaatgcatactcagcgtagtcgtccaggtcattgctagtctccgttggctcgacaatcttgtatttacatgcttctttgtcccagctagacccgtgtcagctatctgaaaagtggaaggggtggttggctggtggctcatacgtttccataactgttttgaattgggattttgatgcccatttctcaaacgacttgaaatcatccggtgtggtacaaatcggactttcgagatcaatctcgtctaccgcctgagcattcccttccctctcattgctggcagaagaagaccgagcaggcttagttgccaaggagagttcagctgacgcatattcatcgtgggtgagcttgaccatcaaccgcttcagtcgacctatgtcaaggcctggtggggattggtcctgggagacaggagtgtttggaggttcttggtccgcaagatcgagcagcgcgctctcaagaaacacaccaaagagaagcatcaggtctttcaaggtggcaggaggcatagtcgactccttcgttgggctacctggtggcgtcaagccttggggacagggagaggaagatgcctttgcagtcttctgtgccaatgccatgtttgtgcggttggacgactgagaaatattggtgcagtatggggagctggtatgagtagaccaaatattggaatgccaatgatgaatggaaaggtcaacagaagcctgagaaattgctccttcttatatgttcgtccctagtcgtccatgccggtgtcttgtctttcttgtatacagatcggcgcaacagactaagtgaacttgcatgcatgtccaggggagttgattgtgcttgcggcaagctaatccaactgatttgacgtcgtcagctagagccaatgacggtcaaccccgtctatatgcacatcacagggaaagattgatgtgattcgtcctcgtctgctagctcaggtgtggtcaggtctgtccacttcaatatcactgaggggtgagaagcatattgttgggcaatatcactccactacggcagtgaaagcatgaaatgatggactgcgaaacaaagtgaaacataaacgggactaaataacacaaaatgagccatcttgtcatctgaagcaccaaaatgagactctatgagacagtgatgacatgacgtaaagaagacaaaagttggtgcaaatagtgtctactaattgttagtggggacaaaatgggacaaaatgggacaaaatgggattaagcaaaatgttcctcgtcaaattattgcggtgtacggcatcacctagtttttcattatcggcattgtctgcggtatttgactacgtcatatagaaggaggtaggtgggaaaagaagtttgaaataaaaattatatgtctttcttgaccttattgcaaatatgaaggactggtgaggatgacatgcttcttgcatccattctcgggtgacgcgaaatcacatgacttgtatttgctacccaaagggagttgggagagccctgcggtgggctcctctttattttgtagtctgtttcatcacagatccttgagtgcaccggtcttcaacaaattctactcagaaggcaatatttaaaggcaagtataccatgccactgctggttctcgagttgatcactctgaaactcgctgacgcgctcgccgagaattaggtgacacgctccaatcaacctttcccacaccctaaaccaccaacgacgaccagccgaacgtcgggattatcatgaacaaaatcaatgaatctgtatttcaaaagccaagggcacaagatgataaaggcctggaagaggaagcgaaatccttgttggttagaatcctggacgttttgcgtttttcaactgcttacctttatctttgtagaatgggaagtccgtggtccttgaaacagagtatttcaacgggaaatttctagattcaagtatcgcccctgcggtcctgatacacggagacgagggagagggcgtcatccactcgcgcgttgccgagggcagcattgatatactttcaacaggccccaaaacagggagtggccagagaattcttgttctgagcgatggacgtactggcctcatgttcagaaacgtattactacgacgtttcctttctggaaacgcctgatgtctggagcatccaaagatactgaatgaaggaataactgaattccctcgatacctcgatgttaacgtttaacccgggaggcagttgaagatcgacatggatatatggaggtgtcaaattgagaagagagtatgagagctgcaggttaggcccgctaattcgaagcagctcactgacagcttgtagatgagggaaatcggcgtggtacgcatggatgaagcccatgagctgtgaagagaggaaaaatattggctcttcgtcggtcatatttactgtaaaagttccgatggaacctttgccatattagcatgttcatgaaatcatagtcatatataaacaaacctgatccctcagaaactggtagctgcgcgctgaggccgctctcagtcctatcattatctgcaatccatccgtcagcacaattccaataaagcgaagaatggagggacactaccaaattctgagagggcattttgaaattcggtggactggtcaatttggctcctttgcggtgttggctctgcaggagagacggcgtattccaccctcttctgtttgacaccccgagacttcctaaaagttctgctttttgttctctcttttgaaaaaaaaaattagtacaatgcattcagcaagtggaagaaatgctatacgttgtacatggacaagacctcctctctctctttcgtggtccagctcgtgaatgagctcaatcgttcgtgattcgaacttttgggagggtgcattgtcctgccaccaatttgcaagacgaggaaatatttccctatggtccaatgatgccagatcagtgatggatattgtgacagtaacaaggacaaacagcggcttcgctatcgagtagatgttcttgaggtgttgtcgcgccttgtcatgtctgttctgggactgccgcgataccgagagtttgattatgttatgcaaaagacaataagacgattctagtcctctctggctgttcgcatctaggaatgggctactgtcaaggatgcctttttggtggagaagagagtcgaagaaatgctcagtcaatgacatggtgtcgccagctagtgaagcacttcaggttgaagaaacaagtcaaaatacagaagcaatgggacaaattgggcgagaacctcctcctaatgtcttatcctgagctttgacctcccactaaccctcctagtctaatactggatgtgacgtggttgcagcttgctgcataagcggcacaaatttatggtcagtcgcccggtcattgcaccaaccatagcctagggaaagacagggaagcgattcctgtgagtcgctttcacctcacacgccctgccttatttctaaatatagtatatcttctgccgcctactttgccttttagcgtccattactgcccattactgctcattactacttactactgaccattattgcgtgctattgacttgcacagcctacgtcgatacataatgttcccccatttctgtacactgctgctcaccactaactaaaattgcctacctgtgtgcaattctgcacgcgactgaccattctctcctaccactgtccactgttggccgcttctctactctcaaccctcattgctcaatatattcccggatgtgcctctcgtccaatagccagccttcttaccacagacgttcctgtctacagatagtgcgtagcaatgctcatcaactcttgaaagtgcagtcctaacggtctcacatcatgcgaggctcatgattataaaagggactcttcttccttaaaatttctgatctgatacacagcaagcttctgacacagatcaaacctcttctccttacctgataaacacaaagcttctaacacggacaaggcctctgccgtaaggtatttgttctcccaggtcttttagaaagagaataaccaaccagaacagatcacgtcaacatgtgcaagagaaactacaacatagcgatgcgtgcttgccgtcataaggttgagacgcccggcagtctgattcccgatgatggatgtaacaattgtggggtagagacaggcagaaacgataacattgccagttctacctcgcattttccttgcgatgactgcaaggctaatggcctttgggcccagacagccgatggaaaatggtacgaggttgcaacaggtgggcctcagaaatttacagctgatttcaggtttccctgtcagttctcctcgtagtactcattttcacgtaatctgacgaccccttctagaattccttggcaactttaactgttcgtggatattgcacggcgaagttcgacaatttattacctgtgaaggactgatgagctaccccatcctaagtcggataatacggcagtcattctttctgcttattcttgtgctgttgtcgagtttgttgttgttttggaaggtctgccagatctatttattagtggaccaaagggcggtccgaagagcaacccgcacgaatttttgatttaggtattaactcgtatttatgatccgtaattatcatcttttttttttctgttgtgcacttttactatagagaattgattctcccctatagaggaacggccctagttaatgagagaagggctcattctgacgaatatggcatggcgagggagtatttagtcgagcctttatttgtaagacaatatcccaaggtttctccctttttcccttctctccactcttgctgtccttccctcacaacacctgtaccaaactattttgccaccacccaaacagttattacttctgtacatttttgccaaaactctgcacggctaatactacgactacatgtgttttgattcgccatgggcttccactacgcggatgctctcgaggaacatagctgggttggcggaggactcgacgcttatatctaccacgtcactccaactattgtggtgaaaactgttcgtcgcgaccgaacccctgaagaaaaggcagcggggcatcccttcctcaaggagatcgcgttttacaaacgtcttaatgagtgccaggatcgatgtccgaatattattgaatgttttctcatgctcccggactatctttttctatcatattgcacgcataaggcaatcgcccctcgcttctatgaacgccaggagcgagagacaggaacaaatggttttcatgggcgtcttattagagtcaaggaatacgaggatcctgctctcatcgctcggtggatacaacaactcacctctgctcttgagtatgtagagaaaatgggcttttgtcacaatgatctgcatgcaagcaactgtcttcttgacaggaacttcaacttaaagctcgctgattttggtcgtgccaccaccattggacagccgcttgaaggtaccttgcctccacgggccaaaccaatacttgctggaccattgaaaggcacatacggtctctgttccgccagaactgaacagtttgccgtcgggacacttctatacttcatggtatatggtcatgaaccctatgacgacgttatcctcagcgccgcggaatgggatcgccgatttggggaaatggactttccagaacttaaccgcaacgaagtttttgatggtctcatttctgcttgttggcacaatgtctatcctacaatggccttgctagcatacgacttcaaacgcaagacaaaggatatgatctggaatgcagaatacgtcttcattgactctgatgaggagacaaagacctgtgaagcattggttcgcagaggcttgctgggacctgagttagctctccgctttcagccggcctggcgaagatacctacatgctattgtgaagagaagcatgtctatttggcaatgctttctacagagaaggttctggacctggtcttggtgaacggttggggcttgtaccatttgacttgctgaggtgcttggacttatagtcttaacccgaaacaaggacatgttatcgtacggtggctgtttcattcaacttcgcgattttcaaacaagaggcggtcttatcttattctatttcgttcggcacctatcagctgggtaacagccccatagctggtcccgtccactgatcttgctggactgcctggtacacagtgaatcaaaataatgaatacatgagatcgtaagctttttcatgcttcttcaagtcgccttgtctccacaacgctagatatctagtttcccctatcctcaggccaacaagtagtcgtggcagtggctgcttaaatttgccaaggttctgttctgctgtaacgtctggcgcagggaacgtaacatccatcccacgcgcagagatcaaagcgccaaacctttttgtggaagcagaacaccctgtgctgtactcagaatgggtcagtggcaagccgctagcgatctggaattttcaaatccctctcgtccacgggacttgtcctgttccttgtgccgcttcgctggcctggccatgtccactcgtgtgcgcccatcggtctgcgtggaagattttagtagagcctgcttaagagcgtaggcgacagaaggccacacatcatatgaactggctcttcgtactacttctcttctagtccaatcattctaggtccagaccagtcttgagatagtctaaaggcgacaggacggcgatcaagtcagactgccaccctttcattggcttatcagcttgctgtgggagcgggtctctgcagcggctttcattggacgtagaaagcccgtggaaagacagtgtggttggttctcctttctccaccttagagtagctacatccaagggcattgccttcgtacttcactatttcgctggaataactggaaactatgttgtatgactgggctattcaaactatacgcaatagcttttggcgagaaagccaaattccataggctcgaacttaccgatggccgcggatctggggagtagactaccgcagcacggaggctcatctggttggaatacttgcgtggaactgtggacttggaccaccaacactcaactacattgttgaattcagtcctcggtttatttacgttgtagtttgtggtgcaagagagattggtgcaagagaaaaacgagggaatggtcaaagtgttgattaggatggtatttcctacgtggcaacctccaaagatcgccgctgtttcttgagcgtcgtgctccagtatacctgtatggaccctttactcctcccggcgaatttctgtgcaaactgtctcgtcacctccgaccaagcaagattctgtccttccctgagcttcaccaataaagatacttcttcctcggaccatagtaaaccttttctcatacaaggggtatgttgagcatcaactagttcggtatttcggcttggctggtcacagtcgtatgtgatgtctgaatcttggtttgcgatgcatcttggtacagtggcatctgtgctcaaaggtgtagaaatacaatgcgataaagcaccctcaaacaaccaggacaggaactctagccggtcttcgacgggaagggccgagaattgagcacgaacggtaggaaacgaaacgctgctgcgacgatggggccctttattggaccgggcggcaccatgttttgaatatctcttctcagcgctcgaacgtttatttattttggactggcgaccaggaaccgccgttccctttgcattttgtcgtctggattgaacaggtgggtcttgattcggagagtgggagcactccaagaggcatctgtctggacatattgcgatgttggtggtattttccgttgtttgggtctgctcaccacctggaaaggcatgatcgtcgaggattgcgggatcgatagcttcattgcctggaaggtgttgaccagcaagaacggcagggtctgagtcgcacgatccaaaaccggaagatcgatgctccgcacccagacaaacattatcgggtattgtggtggaatcgatatcttcggtgctccgtaggtcttgcatttgcaaaaggtcttcagagtcgaaagtctcagcgtgaggactagtgaaggtggtacggcccaaatcctcaggctcgtgtcgagtggtctgagcgtccgaatgtaggccgtcatccaagcaaacctccaacggcgggcgggcaggaaggggatgccggccaggtttgtgagaatgacttttttgattcttagagacggggtcgataggattggagggaggcggggtgggagtcatcgagacaggacttgggtagcggcaaatatcgagagaatctcgcagaggctgggctttgtcctggaaaggattccatggccgaaaggattccaggcgaaaactagcgtttgacatattgtgtggaacagacggctgagacagtcttcgagatgtggtggttgtgggtagtcataaaacagggagactggcagagaacagagaactagggatgggggataggggataggggacaggggatgggggacagggtgcaggggagaggagaatttgaaggggttttgaattacagttttgccatttgggtggaattgtagtctctttatagacggcggtcgccagtgaggcggaatctgccttctctccagcgtagaagatcccgaccgactcctggaatccaggccactgcatccaagacgcgggaccacaccagtttcacaaccacgggttgtagctcaccggcaaaaatcaccactactcttccttgcggacgacctttgcgatgcatgccccacactagtcgtcagcttgttctccattcggtagtacaggtgtgatcgtggtacggtttccgcagtcgcggtccggcattggccgcatgatgcatcgtcgaccgaggtcaggcgcgtgcgaggcatttttgctattggcccatatcgccgcactgtgctttcgaaattcatcgattgggtgcggagagaccggagagaccgacgatgacgacaactgggcgccacgggattcgcgacgaggcaacggagagtcgttctgcgacatcaggggctgtgcaatgtaacctccgatggggcggatggagcggggcatatggcatcgaagatagtatgccagaactttgcagatgcgatggaggtcggtgaaatgagtgacgctcaacaagcaaggcgctctagcagagaaggcgacctagatagcttcgtaacacggtgtactgtcactcctctaggaaaagagtaggagggagtatcgacacgaaaccgaacgatgcggctgcgggctggatcatcccagggattctgctcctgggcgactggatggcatggcagtccaggacggccagaacgagctgggcgtcggatggagcggcatttccggtaaaatgaaaggggcagtgcgtcgagctgaaagccaatgcgcaagcgacggtgggggcgagaaagaaagggagcagagaagggaaaagagggaaagagaagggaaagtgcgtcgacaagtcgaggggagagggccagcgggtgttatatagatgaatggcagatggccggggcggtaaaagcggccagggacggggctaaacccaaacggggggagggtgagggcgctaaacctgaaggggcagggagatggtggagacgggcaggcggtcggggacggcagaggggcggtgcaatgggagctgtttccagcccaccgctcaccgtgtcaactaatctcgtatagtagtaattaactattagaagcaccaactagtatctaaagttgatttaaatagaaattggacgtggtctaaatctgggagtaggcgatggtcggaaatgcagaagtttagtttggtccaaaatgcagaagttcgggatggtcgaaaatgcagaagttcagtttagatgacttcttctgcattttggaccaaaccgaacttctgcatttccgaccatccggttcttctgcattttcgactaaacggaacttctacagaacttttacatttccgactgtcggattataatccatttttaactatactaaattactatattttagactatattctcccttaacaagtagaagcactaactagtatctacagtattttaaaatagatatatggcgtggtcaaatttctgggagtaggcaatggtcggaaatgcagaagtttggtttggtccaaaatgcagaagttcagtttagacgacttcttctgcattttggaccaacccgaacttctgcattttcgactatcggattataatccattttaactatacccaactactatatttcagactatattctcccttaataagcagaaattatacttatatagtagtaattaactattagaagtaccaattggtatcttttttatcttaaaacagatatatggcgtggtcaaatttgtgggagtaggcgatggtcggaaatgcagaagttcggtttggtccaaaatgcagaagttcagttcagatgataacttctgcattttagaccaaagcttcccttttgggaattttcgaccaaacgctaacccgattcggaattttgaaccaaagctaccgatccagttgacaaacttcaaccccttccaaagaattaaataaaatagatagaattatacaggcatcacatataggtttatatatactatgagtttgtctaaaaaatataaaaatcataaaaatcatagaatagaggctttaatatgtgcctgtattcggctaatagactgctgagtgacagctcctgagtctctaggtgccgcgcccgatgctgctgacctgtatactatatccctggactcttgcgttgccggttcaaagtcaatcactccattccaccattccatcaagatgcgggcgctgtaagattgctcctccgagagacgcggtagtaatttctcaaagttgtcgttatccagcagtagcagccagttctccagtgcccgcttccagccacggtaactgtctgcttcttctgccgttctccgtccagtgccaaaggaccattcgaccatggccccaatggagaacttggagatatcaaccctgtcctcctcttcctcttccagctcctgctgattgagcacactctgaggactacttagtccgcctagcgtcagatctttcaagccccgcgtagagaaaaaggcaccaatcaacatatcttgggccattttctgggcgaccaaaggagaagaacccatctcactgtcgcaggcctcgctatccgtcacaaaagccaacccccttagagcagccacgaggagtgaataactggcattgctctctgtttcctttctagccgacgtactagcctcatagtcaaacgccgtctccctaaattgatccgagcccaacccacagattccgcggatgcagtgggcggcgagtagttgcgggtgagggccaagagcttcttgtccattgccgagataagatggcagctggttttgcgggggtatacctgaagtttccaggagacggttgtagaggttatatagccctttgtagaagttttcgggcgcgacgaggttgtcgtcgatgtctgcaacgaatttgtacagatttctggccattttcgatcggcgctgagaacgaagagggtggattaccctcctctcgcgattgaaattgcttgcccgtgctgttgggagcctcgcccgaaggcaccaatgggttttccccacgtatcgtgtcacttggccatggcgctatgcatccctgtcaaagattgtattcgagggttaacttttgtaaagcattagatagatagatcccgtggattaggcaactcttaaaactaagacgatccagttcagctgtgggagaagcaactgagaaacagagggcaaaaaagccgagataaaggtaaaaatatatatagcccgaagggcttgttcagacacttggtatagttttatactaggataacgtatgtaaagttcttaagaatatccgggtagtctcctacattacatgaataaattgcttaataccgtgcaatttatattacaggggcgcagatgccctacaatctacatactgtattatcctatatgccttgacacctgaatgttctgcctggccggtcacgtgttaccctgcccttgggacatgcggcggacggaaatccgcgccaatgagcattgcgggactggaagctggaggaccactctcggcctgttttaagtcgcttcaataccggtagttcctgcaatgcttacatgctgggtggtctcgggtctactgttttggaagcggaatcaaggtgatcagaaatacgaaagatttcctggaatcacgtggcatgggttgcgtacacctgacgaggctgtgtgttgcctcatgcctgcatggcctcagccttgttgcaactgaacatttgttcttatcatccccccgactgcagagaaagggtcggggtgcccacgctacattatgaatgatggctcgacgcaggctcactcatcacgagtatacagttggatggatatgtgctttgccaatcgagttgaaagcagcgtgtgcggtactcgaccaagtccatgagacgctgccttcagccgaccgcgacgacaatgtgtacacgctggggcaggtggcccagcacaacatcgtcatcacatgccttccgaagggaatatatggaacaacccaagctgcgattgtcgcgcaaaggatggagctgagcttccctaatattcaataccgactgatggtcggggttggagggggagtcccttgtcctggcgatgtccggctgggcgatgtggtgattggcgtccctggcgctaattccacggggattgtcgcttacgaccacggaaaaacaactactgctggccatctagagcagacagtgattctcaacaaacccccgttgaacatgctcaaggcagttcctcacctcggacgccgtgttcggtccgtcagtcagactctgcaatcagcgatcgcgtcagatcccataccactggcagaatttgcatgtcctgggaaagagaatgacaaactattcgaggccgagtatgaccatccggattcgagtcgaagctgctcaagctgttgcgatgaggcgaaggttttgcggagacctcaaagagaaagtgtcgagccacatatccatacaggaacaattggatccggcaatcaggtcatcaaggatgctagaacgagagattctttggccaaagcgcatggaatattatgtttcgaaatggaagcggcggggcttgtggactcgtggccttgtttggtgtttcgaggcatctgcgactattcggactcccataagcagaaacagtggcagccatatgcggccataaccgcggcagcgtgtgcaagaagcctaatgttgctattgaacggaaagccacgtgaatgttaccaaaaccatgaagaagttgatgttccactggcctattcagacgctcgaaaggaatgcgttcagatcctatcattcagcaaccctattcgacatagggaagacctacaggaacggaaaggaagaagggccaagggaacctgcgagtggatgctgaaaaataacatctttcaagagtggcgtgagggttctggaaaaaacgattccaacattctgtggcttcacggcttgccagcaagtggcaagtccatgatgacaatcttccttaccgaagccctggagaacgatccaaatatgggagatgcaggcctggtgatttatttcttctgcgattccagctcccagaatcacacttcgggaatcgctgttctgagtggtttgatctggcaattgatcaaagatcgaccaataggtcaggaagtggttaggagatggtatgaagacgataaggtgctgtttacttctttcaaccgtctgtggaaattgttcattatgttgttgaatggtgggagcgaggggaaggtttattgtgtcattgacgcccttgatgagtgcgaccgagagtcacaaaacgcgatattgagaaagtttgagaactttttcgacccagagtactacgatcgatccctctcacatgtctatttcctcattacaagcagaccgtatgaggagatcagaacatacttggggggctttgtcaacgcggatatcggtgggttcgccgaggcaaaggatgatggtgctgcgttcgttgaaaactctgtggattacttgaccgagaagaagaggttttccactgagatgcaggggagagttcgtcacattattcaggaaaaagccgaagataccttcctctgggtctctttggctatggaggaagtgaaggatgctgctcgggcggatatcataggaatcctcgagcaattgcctactggactgagcagtctctatgggcaactgctcgaaagggcagcccaggctcgacccgagagcaaggaagacattcttcgtattgtcaatatcgtggcagtgtctctggaacctctcagtctcttgcaattagcctatgcctgccagttttatgcacaggaaagcgaggaagaacaggtacttgcaatgagaagctccatccacgattgcaagcttctggttgttgaaacaaacgataaagttgcattgctacataagtcagtcaaggactttcttacggacgaccggtataccagcggctctggccttcgggctgcccatgcgtttctagcgtataggtgtatcgatcgttgcatggagactgggcatcccaattgttgtttcgaaatttggcggccgcaaagatgagaaaattgacgatactagcctactcccctatgcaattcgtttctggccggagcacgcacatttcgcgggagagcagttcgagatcatcgagaaacaggtacattcttcaaagaggactctcttcagtggcaaaattggtggtcgcacctttctgcttcacaaacctacaaaagatgggcaaagccttctccatttcacattgctgcgatatggggaattctaccactcgttaagtacattctgcagaccacctcagtggacagataccacaggaccgaatatttggacaccgactttgtcacacaggagggcaagaccgctctagaactggcggcttcgtcggggcatgaaataattgtgtgccatctactagaaaatgcaccagcagagatggtaattttcaggggtgtcctagaagcagccatcaagaacacgcaacgaggggcgcaaatcatcgacgcgctccttttgcatccacgagcccgcacatcaaattggaaccatgcacacctcgtcaaagctgccaaaaaccctatatgtggtcgtgagattttacaaagtcttcttaagagggtccctaagctacggagttctttggatgacgacgtactagtagcagcggcaaggaacagcgacttggagcccatgagactgttgctcaccgttgatatggagaacacgaacttgagtgaaaaggtgttactgaaagcggttgggaacaaggcaaaggggcataacatgactcaccttctactcacgtctggaaccacaggttcaataacagagcctattataaacaaggcagcgagtaatacccgacagggactttccattctgagagttcttttgagacgatataatggaaggatttcagccaccacattgatccaggcagcgaaaattggacaagatcgtgctcatctactcctgcagcatgcctctggaatcgatataggcagcagcgatatgagagcgttccagcttctcaatccagaaactgctataaatatggtgcgaacaatctttgtcgagaatggagagccaaattttgtgaatagcagaattctctctgcttgttgtagacacctgactggtgctcaactatcgttgatcctcgggcgaagagaaaaccggctgcacattacgtcaagtctattcgcatcggcattgaaaaatgagagacactgtatcccagtgatggagagcctacgacaatactgggaaggaccaattccatttacgcggggggtcctaaacaggctcatgcggttgaatggcagctatgaagttatcaattatgtctgggagcacactgacacgggaacagccaatatatcaataggtcgctggggttgcattttcacgggagtggaaggggtcaacaatgtacaagcactgctggatcgcgacggcggagtgatgataataaggcagcgcgacctctatggggctgatcgggcgcgacatgccagcaatacctggaatcaaatcttgcaatgggccttggagcgtccgcgagacaaattgcatatcacaccgcgtgctatggagctgatactccggttctggagaaaacagacagcgcggactctattgcagcaggaccagcgccaaatatcattccatgaggaggctttgaaaatcattgtggaacggtttgatcatttcgacctgcttacagtgctgaatgggatgcaaaacccgctgactgtgacggagggtatccttattgcggcgtcaagaaacagtcgttgccacagagagatgctccgcaccctcatagacagaatgcagcaaactgtctcggtcacccctcatatcattagagcgattgcgcgagcagatgaagggtcgctcgagttgctgatgtccaaaaacgacggctgcttcgaaattaccgatgatgtggtgatggaggtatttgagaacgatcgaaatgattgcaaaatgatgcgtactcttctctcccagaacaaagagaaacgaagtataacatctcaaggtgcagttgcaattgtcggacatgtgactgtggtagagcttttgcttcgggagtatacgattgctagcctgtcaaacaacatgattgtggccgccttatccaacagtgtcaacccctctcctatacttgaaatacttctgaaacagtcgagagaatggacgtttgatgggacttggtggggctcaattactcgggcactctcgcaagatacatttcagtggctccacgccaaagtctcggataacaacgtcacccccgaatccttcctacaaggtgccttgtcaaatccacgactgagttttcagtccctttgccatcttcttgagtcagttcctgcccaggagacaatatctcaacgcttggcaggttgcagcgcgaggaaccaaacccattccggccaccttgtccagttcatattggccaggaatgatgctcaattgatcttcatcactgaagatcttgtgggaggtggtctgggaacccagaggctcggtgatgtcgctttgaaagatctcctctgtattgacagcaaccgaatcaaggttacacacagtggggtatatactatactgcgctggtatgaccagagcattgtcgattgcctgatcaagagaacgggaacagacgttcatttcacagctgatctgattcaggcgctcattttgaattcaacccatggtaaagatattatgcaatggttgctgatggaagaacatatactgctttcgctatctcaactagccttgattattgaaagtggatgtttcaatgtcgatgttctaaaacagactctgactggcccttctgtgagaatgaccgagcctctttttgatgccatcacaggggctgacgatggatattctatgatggatgcatatctcaatacacattctattggttcgattcggattacagtccctgccgttgtcaaaatgattgggacacctcaccgccacaatttgccattgctaaaactgctccttcggcaatcacggacacaggtttacgtcgcacaacctgtcattcgagctgcacttcgagcattcaatactcagaagcttgaatcgtttattgacattttaaagctattgatgacgcgaggagacaaaatctttgcagacaaagggtgcatggcagaactactcgctcacaaatatgcggaatgtttgatggtgacaatttgtgatcatacccttgaggaggagcttataatctcaaatgatatggtcaaggggttggagcactacgacgctatcaaagtactcgtgaagcgtgccaaattccaagttgtcattactgaagctgcaatgtgcaatgtagttgccagacctggttatgcgatagacattcgtctgctgatttcacggccaaactggaagatccctatcacggagatcgttctttgtgcagcactcatgaaaggccgtcgcggatcaaatcatatgccggccctatttcagcatgcgaggcacgtacagctgacatcggtatttttcaagaccctaactgaggcccaagttaccacgatggaacccgaaatggagtatatcgagagtttcttagcatttttcaagacgattcgcctagctggttgtatcagagccgacatggtggatggtattgtcgagcactgctcttttccgatcgtccttgccctgttcgacagaattgatgatcgaattccgttctccaatagtacattgccgtttctagcaagaaaattcaacgagataatcattgcaatcttcctcgatcgacacggcagtaactcgcttattaacgaggaggttcttgctgctgccgcttcaaatggcgaacatgggcctgacgtcgtcactatccttctacagcgcagccatgtccttccaaccgagagcgtcctgctggctgcagccacaaatttggggcaaggtctgaatgtctttaatattctacttgctcatttgtccgagacatcaggaaatatagtggacacagatcgaaaaaacgatgcggtcgcattggaaggtttattagcaaaggatgtcctttttgcagggctcgagacgtgctttgccgacactgtgactaaatatcgcagtcagaaaatatatttcactggcgtcactctccaggatcgggtattgcgtgtagtggctatgttgattgagtgtggagtctctgtcgtcttcaacgaagatgatctcctcaggctttttgaactctacacgctgggcccccattctcatttcatcctgcagacacacagagggaggttaccggccttcacccccaatttgatagcgagagtccgattgcgagtcacaaagtacctgtcttacaaggtgttccgttacgacccgttgtttgtacccgcaattcacctggcgatcagggatattgatcccataaccttcaactctttgatcaagaggagtgaacgtccatcccaggaggtcagcgcagtggtggagtcatgcagtcagcaatggcttgggaaacaaactgtgctccaagtgttgaattcccaggaattggaaattacaggagaaatgataataaagggagcgctcgatcaatttgacagcttcgagctgttacgacagccaaatgtcaaaataacacgtggcgcattgcaaaggatttcgcagcaccttaacccatgggacagctggggcctgttggacctgaatctaagtctgagattgttgacgaggaaacctggatcttcatggtctggaagttcaccgacctcgacctgagtcgcctcgatcccagtcttgtggactggaaagaggtgatcgaaaaagcaggccgtcgaggaatgatttcagaaagtgtgttgtcctcagtgattcgcacgaagaactatgatatggtcgacttgtgcctgaaaaattaccacaagccgctggtcgtgacacaacaactcgtggattcctttgctggttttcctcctcggtttcatctcgaaccgcgcgcacgtccagatgtgaagagcctgcgcaggttacttcaacatgggacgctcgttcaccccatccactcatctagtatcgaaagaatactcgagatattcggttctggaatcgcagatgaactcttcaaaatcaccgaaaatcggctattagttgacgaatccgtcttggtgtccatcgtatccacaaaaaacgtgaagattatcaagtcattcttcaaaagatacacggatcatctgactattacccccagggttctcattatggtcctgcagacagatgcaccaagtcatgttgaggtaacaaccaacgatgaatatggtgaaccagacgagacctcggagtgcaaccccggttggcctgaatccgacgaactctacgacagtaaatcttctgatcactcgagcgtgcttaaacctcgccaatattggtatgctgagccgcaggtgcccaatgatgaaagggacgctgagaatctgaaaatgaacgaagacacaaacacggcgtactacacctctgcgtatttacttgaatatctgctacgctactgcacatacgaccctatggggcttacgaaagatattctcctgtctgccgtggcgaatagagagtgtgaggccctttttacgattattgccaaatactacagccttgaaagcgtgagaattacgcaaaacattgcccaggctgctgcatccaacagcaagcgaaatgtgcaacttctcctggactggttcccgggaaaggtcccaattacagaggacgttcttattgcagcagcaagaaattctaaagagagctacgagactcttcggctactgttctcttgctcttcgtaccggatatcagtatccaaaaaggtcatgatagcgctgttgcagaatcccaattcttgcccttctgcctttcgacttgtgtttgaatatggaggtagcagtctactcaggagccaggaaatcaagacttcgattgttagaaatgcaggaagaggctcggttttgcagttctttctggagcttcctgggttcagcctgacagtgaccgagaacatggtccgatcgaacgaaaacgacggggaacccctaataagcagcagtcttctatttaaggaccgtagagtcaggttttcccctgcttcgattgcattcgtcatggccaagggagacgcagactccactatgtccctgttggagaagctcgccactgaccgagaagaccaccacttaacggagaatgtcttcctccatgctatatcgaatgagcaagaacgggcttggtttacggtacatcatctattgccactcataagcaagttcctcaccgagaaagcctggatcgcagctgccaaaaataaagttaacgggtggactctgatgcaaatgttcgcagattatgacccaactttagaatcaatgactcccacggtacttttgcatgctgcacgcaatgacctgctcggcaatgacattctcaaatggcttttatcttaccatccgtctaaagttcggttctctgagggcatcctggcagctatctcggggaacccgagctggtggacgggtgagcctctcaccagcgagatctatcggccccatatatggcagaatggccccatccttgaggtaatacttcatcaagcccaggagaatgcaaagatcacggagaatattcttatagctgcagtcaagaatcctacgcacagtgctcggtatctcagagtattgctccaacatcctacgagagaagtcttgaatcttcaaagggtcgcagcaatcgctgcagcccaggaatccgtggaaataaaatcacttctcagcttttttcagcacggtgctagaaccaacgaagatatagtggtagcagcaatgagaaatagtcaacgtggcggggatattttcgagctgcttcgcgtcgagaatctctggggcgacttcgttgccactgataaagtgctgtcggcagcagccgataatgcagagaacggaaatgacttgctcgaagactttctgagatcttatcagggagtcattgtgcttcaagacgagcatatcgaaaaggtcgccaactccttcagcttggatgtgatgcgtcagttgcgcattcgccagaggtttcctgtttccaacccgctacctgttttcgcttattctcactatcttttctatgtcctccatcgttggtttgtgctatattgttgagatttttagttgtttagtataacttgtagccaggactagggccaggtctcataatatagtccagcctcggctgtgatagcatggctaaagctggtgtttttcagcgaggataccttttatatctcctgataaaggcctgcaggcccgtaatattttaattttacttctataagcgaggattattactctttatttttttaatctagtaagactagtttaaaaatatatactaaaaagagtatatctattttatatctactttagagatatatatatagttattactagtaatataattaaaattaaagaggctaagccatattgagatttttattaaagagtacggcatatattaagtagcctaagtgatttaattaggagatatagtattataatagtataaattttatagctgtatatagaggtctaatcatgtctataatttctggaactccaagatcattggcagaaagccaaggtgctgaattattgtgggcacacaaacaccatgcatgagctgaccctagaactggaaacgagtaggttgaatctatgcactcttaacttgcacgaccttgttctcagtttcatcaaccaacacctgtcttctttccgtactcttctttcgaggattgggtgcatcaaagatctccgtgagttcttcgagtgtccggttattcgtttcaacagcgaagaagtagatgaatactccctgaacaatgttccagccagccagaatgatatatgtgtgccagccaatagcctcgatagcatttccaactccgaactgatttaccagcaaggcgatattagtgaagagagagtacattgccattcccttggcgcgagtctcgtatgcaagacattcaacagcgtacatggcttgcaaaggagtccatccaaagctgtaaaaagcggcgatcaagaagacaaacacaatagaagcagtggccgcgtctgtgttcaatgtttccgagtacaccccggttgtggctgcaaaactcgcaaggccgatcttcatatcgaaaaattagcggagaacattgataaaagcagagggcgggacgtatatacttaccgcgcaagcaatagacacgccaatcatcataggtctgcggcggatttttgggcccaaataacttcccagatatgctagacctgcagaaactaccgtgatgccaaggttgacgtccagcacacgctccgtatcagtaataccagctgtggctaaaagcccaccaatatagtaggttgtaacgccagcctgtgcccattggctcataaaagatgcaatagccacacacatgagtctccacctcgcggcctttgttctaacaagagacctaaagtcccatgcgttcttatcggaaccttccatgttgattgcctcttcatagtctcggatctgtagttgaacataggcattatcccggaaaccctcgccgtggtacttggcaataatatcccaggcttcctcgctgcggccatggctatagagccagcgaggtgactcgggaatgaaccaaacagacaacactataatgccggatgaaatcagctggcaccaaatggggatgcgccatgcaagagaactttcaaatctcagacatccacgacaagcgccagcagcagcaatagctccgataaaatactggcaattgtaaaagccagtcagaatatcacggtatgcagggtgactcatctcgacgacataggcaggtgcggcggagcctgccagggagtatccccaacctaagatatcctgttagcggagttattcgaatgggtagtgactaggaacataccaaggaaaaatcgactggcaagcaattgatccatgtggttggcagtgccaccaacaattgtacccagaatgacagcgcagcatccagtaaacatgccacaccgtcgaccccaagtatctaggatgattccgacaaatggcagcgcggagacacctccaatggtatacattccctgaatcaacgcggccttggaaccgactaagccagagccgaaggtttcacggaactgctctataggaagtagagcacccataagcgagccatcgaatcctggacagcagttagtggttaacttttcatagctatcgagtgtttccctcgtaccattcaatgccgagcaaagatatgccacaatcaagaataaatataactttctcatctgcacgctccacggtttcgggggatcgctccgcctggctaagtcgagagccagtgagccgtgaacagtctcaaccttgacgccctccttgacgccatccccgtgttcttggtgcgtagcatggcagtcaccttccttctccgctagttggtctggatgtgtagggtctcccatgatgctgaaaggtcttgttctccacgccgtgggaggtaatccgcaaagagtatgacccaattcaacgggaaaaggatggctgcggggtgttatttattctcacaatcatgggcttccttctctcgccctcgccgacatgaagtggtaggtttgtgacagtctccgatgcccatagcacaaccggattctgtcaaattccttgccctacgtttggccaatcacgacagtcttgtggcaatgacagttttccgggacgtgcgcgtctagatccgcaagcccacgtggacagacggcgattggccgtctttaaactttgtgggttaaaagtctgcgcaagtcttgcccggccccgattgacgcggtgccggtagccccgtgaatttctattgggcccaacatgctcattctccccgcaggactcaccccacaattcacggctccgatagacccgcggggattgttggagacccgggggtgactccatgccgagcgtacataccgacgactcttttgccgccaggtccataaaatctgtaagatagtcttaggtccttctcagaccccgacgtcatttagtctaacaatatggtataaaggacgcagggtagcaaagctggccccaactcagtcaacgaccctggagtccgaatttatttccgtcaaattcccattctaggaccatgagctctccggccaaacagctggccttgcaggccgatcccgaacggcccgatttcatgaaccccgcggtctttcgccgaaatacccttcccgcgcgttcttaccacattcctagcacatctctgcttctcaatggagcctgggagttcaacatgtcccggtcaccaccggaggcaccggagcctagcgaggatatctccgccgaggcctggtcgagcatcaatgtgccaggtcattggcagttgcagggttggggaaagccaaattatacaaacacacagttccctatccctgtgtgccccccatgtgtaccaaccgagaacccaacggggacataccgtcggaagtttcaagtgccatccgagtggaaaaccaacaacacagagattcgtttgcgattcgacggtgtcgatagcgcgtaccacatttgggtgaacaaggccttggtcgggtatgcgcaggggagcagaaacgcctctgaattcgacgtcacatcgtttttgcaggacggtgacaatgaagtctttgtgcgggtgtatcagtggtcagacgctacctatatcgaagaccaggatcagtggtggctctctggtaatacttaaatggccctaagtaacccttagtaggacagaggtatgtgctaatatggatcatgagaataggcattttccgagatgtcactttgattgcattgccagccgacgaccgcttgaatgactggtttatccgcactgaactcgattcagagtacagaaatgcgacgcttctcgcaacaattgactaccaagtctccgagccaagcgctgttgtgctcaatttgattgacccggtgcacggcagcaggagcgtcattgcttccaccgagtgtattgtggagccagcaacatctacagtggaattaagcttgcctgttgccaaccccaagaaatggagtgccgagcagccgtatctgtatgaggtggagatgctcttgacacctcgcggatccaacaagccattcactatcacacagcgcattggcttccgcaaagtcgagcgcaagggtggtctcatcaccgtcaacggaaaggccattcagcttcggggagtcaaccgacacgaccaccacccgttgttgggtcgtgccgtgccgctggacttcatgcgcagagatctacttctcatgaaagcccacaacgttaatgcgctccgctgcagccattatccccccgatcctcggcttctcgacatggccgacgagctgggcttgtgggttatggatgaagctgatcttgaatgtcatggcttctatgatgctgtctcacgcccaatggacatcgatgaatctcttggctacgaggagcgcaaggggttgacattcccgcagtgtggtgctcatacatcagacaaccccttctggcgcgaagcgtacgtggatcgagttcaatcaatgattcaacgagacaagaaccatgctagtgttattatctggtccatgggaaatgagtctttctttggcacatgtcaccggtccatggtagagtatgcccgcgctttcgacagcactcgcttgattcactacgagggagacatgcctgcggagaccactgacatgttcagctacatgtacccggagatcgaccggctgcgatccttggcagccaacgagggtgtttcgagtaatggcgagtttgagaaacctatcattctctgcgaatacggtcatgccatgggcaacggacccggcctccttacggaatacgagaaatgctttgacgagatcccgcgtctccagggtggtttcatctgggaatgggccaatcatgggttatacgttgaaggaaacagcaagaaagacggcttttatgcctacggtggtgacttcgatgactatccgaacgatggaacattcgtgatggatggtctcctgaacagtgcccatcagcctctaccgggcctgttggagctaaagagagtctatgagccagtcaagctggaagtctgtggacagcgcttggccctgaagaaccggtacaactttttggacctgaatcatctccaagcttcatacaagcttgaagcatttgacaaggagtgagtccacaactctcgtttcaataaattgaagacattctaacttttcaacctagaacaaaaaccttggcaactggatcgctagacctgcccattgtgcccgctgggcaatctgctgaaatttctctcccggaagagctattccaacacaacgtccaccccgcctacttgaccattacccttgagcagcgaggaaaggtcgaatgggatgagggaacttatgccgttgcttggacacaagctttggtatcacagccaaccgagcaagggctagtcaatggcttgggctctgctcagagcgctctctcaacaaactccaccaagacaactatatctgtcagcggagccaactggtcctttgagttcgatcgcatacgcggacatctcaggaaatggacacacaactccagatctattctcgagccgagtcccgacacagggcttgctatggtacctggtttctggcgtcctccgacagataacgacgtacctcaggcagcgccgtattggaagcgattcggtgtgaactgcctcacaaaccaattccgttctctcaacggatcaacactggaggatgggagtgtctgcatcgaaagtgagacattcatctcgcctccggttctttcttggggatggaaatgtcttgcgcgttataccatcaagcccaacggctcattatccatcaccatgaacttgcaacccacgggtgccgcaccgtcaactgttccacgggttggtctcaatcttcgtgcaaactctgatctgcaggcggcacgttggcttggacttggtcctggagaatcgtacccggacaagaagattgcgcagaagtttggtttgtggaatgttgatgacattgcgtccttgcagacggtgtatgacattccacaggagaatggaaaccgcatggatactgcctgggtagaaattctcgctcccaatggcacgggcttccgtgcaagccctcaaaaaagtacagtggtgaatgggggaacgggaagcctgagctggacagctagccagtactctgatgagactgttgaggcggcacgacacacttgtgatctcgtaaaagatgatgccgtatttgtgaggttggatgaccacgtcgcaggcgtaggaagtgcggcctgtggccccggagtcatggatgagcatctagttaaggtgcaggatctcacctttggtatggtattggagcctatatcttcgtgagaactaaaaagctagatcttggtttgttcaatagattgcagtcccatgtatactttttaactaattcacccataactttttaatctgaccagttcgtcagatttcagtcttagtccacagctataaaggttctatagaagcaaactagtacacatccctggtgtcgtaacactcggctggtataccacatgagccgtccgtctttgttggtaaagggcaatttaggatggccctatgttgtggaaacgtctctacaaggccaacataataaggatccattaattatcattagacataaatatgtaaggcctatttataccattcaattctagcgctaagaacaaacgagctttccttgtgtgaccctatactgaatacttcgtttactgtccaaacggtgaatgtttctgctttggtgactattcatgaggcagggcaaaaccatgtccctgctggttgtttcaaggctgaaagtcgctgaagtctcgggatagcaaggcttctagagagccggacggattcaaataacccccgtaaggaccgagtggttgcaatagcggcgcaatagagttccaatacgtgcttttcaggctcttctgagaggcagaagggtttgaacaagagagatctatcgctgtcagttctgcattattgaaggcaatagagttttgagatatctgaggcaggttggccaacgccggccggactcccgggacaaaggacaacgggtcgtgaactaatagagccccaattaactcttgagttctagacaccaatccgagctgtgttgagatagttcgagacacatcgagtcacattgatagtgccgtcttgtttactaagtggtatacatttcccggactttgctaaatggcttactgacaagtactatctgagaggcattcgaagggacacaggagagagatgttgttcctcctccccgcaaggagcaaagtctgcacttttgctttcgaagaacgcgtgggctttcatgatgagtctcaatgccttctccatactgggagaaacggaggatccatggatagtcatccatcgttgcaaatgctgctccaggcggggccctagatctagcaacggaatatggcgaagctgcattgtcagctgtggatgacagaagccacccatgagagtcaagatcgctgtctcgagtctaacaagataattcgttgtatcagcaacaatgcccaacagttgcgaagtcttccggaatcagacttacgagagcgaacatggccatgcgtctaccatgacagtatatggcacctgcttcaggtgcctcaatttgaataggcaagtgtcgagggcaacccgacagccatcgagcacacgcagattgttgttaagatcccacaatggattagcgagggcccactccagatatggtcgatagatgacacttcgacagctgaggtaccactgtctcaaatactcgctgtgcgggtcgtctgcaggcttgtcgtcttcggggaatcgcagacttggaggtagggtttgataccagtcgtgtagttggcgtgccagttcttggttcacggaatagaaattattggaatcaatttgaaggcccctgtcgcggtcatagagcatgtagtgggcgcggttgaggaggcgacggagtgcaatggatgctagaaagtagaagttggacttttcttcctcttcaatagcttcatgtgagtggaattttcccggaagagcaaatactgattcgatttcagtattgctgttttgcggaagggagggcaattcagagatatagttgctagtgcgagtcaggcagtgataagggtaaggtgtcattgccattgcttacctttctaatacaaagcacgaccagaatattctagtgatatgttctcggtcatcacgctcggggttgtcaagagggcaagagagcaggaaacgagaacgggtggccgcgctgttcacataagaccacgtttgcagtggcctttgcaagaaggagaagtagagactacgcattcgtcagtttcatctggacacgctgtttcggccggtaacaatgtcatcatacccagtcagcaagaggcattggcacgcttccatattcatttcaatttgggctaagtggagcatcttcattgcagcagtgaaccatgattctccttggagcttcagctgttgagacttgctttcagaactgtcctcttcgtctatcacggacgcgccgacgcagcccaaagccatgaccaacaatgcgagacacgattggcagctaggctccaaattctcttgccatatcctcaattgcagggatttcagctcgtccaagctgatggtagggaaccaaaagttatacgtccgttggaatacacctaccatatttttgacatctgacaagcccgcgctggggactatgccatagagtttgcttggaaatgacggtcgtccgtactcgagcgacaaaaatgaggactgtgcctcctccaatattgaagggtgatcactaaacatgttccacttcaaaagagactctgctgaggagagatgtcctgatgaaagcaccgcgctttcagtggggtccatagttgtgcggccccctggatgatggcgtgcatcctgagaaacccgggtaattgtcggacaggaagacgttgtatctgcctgaatgtcactcgtcacacttgaaccggagcccatagcctgaaatatgtaatcagcgagtgagaaatagcgttgcgccattcgttacatacgaccatgcccttaagttcatcaatggaagcttccatccgcaagaccgtatccaagatcatttcgcttttcccccttctgatctcatgtcaattgccgatcatcagcatggcaacaagtcacttacgatgtagcttctgttccatatgaacacatttggttcaagctcacgcagggcccacagggatcccgagcgtcacatctgtcaatcttgtcaatcgccgtgtactacaaaataacatgtgacatgactagccttgtcttgcggtggcggcatgagtcgcactgttgggttgggttgtattagtcttggtgtctcccgaggaatggggacacggaccgctcgagccgccctgaatctcttcatttcgagccaggacgctggtattaaggggattccccgtgactgaattcttgatcagcttcgacaatgagcttctattgacagcaattgagcgaattaatagtgtaggcggcgaagactcgggtggaaaagtcgcagtggcgtgaatcatgtgaccacgatagggcctctcaccctccgaatgactaatcggcatccagcactgtataaactatcgacctggtagattagatatattgaccagtatattgatcctatcctacaggttagatgctcccaattgggaatctacatgaggacttggatagctatgtagtcctctaggttgttgttcagttggtggttaggtctctacattctaacttaagcttagctgattataaagggcttatataaataaggtctagcggtacgatggcggattgacatatgtggtaggtgagaggcaacacgccgcagtggagggggccggctatgttatatttaggcccacaacgtgcaaagtgggcaagcagtaaacacgacaaaaattgagggagaaaaagaacagcagatatcttggttgttggcaggatctattacgcaggaacccattatcatacctggaaacagccagccatccataaaagttaagtagcccggccacccttgcaaaggtctcatacccaagggctttgatttgcggtcttgaaagatacatcacagatcggcttctctgtgaagaaggttgagagcaaggtgaaggttggaaggtgcgtagaagatataaacaagagttgagtggctttccaagcaagtctaccatttgaatattcaaaccatcgagagtctagtattacgtaccggctgctgtggattgtgcgattgaagctattgattggagcgaagggcagaaacaggtgcgcagcagagctggagctgtacgtcgaacgactggcggcggctagtagggatcaaagaactagctttaaataacaagttaataattaatctaggctttacaattagtatatacctggtggacactggtatgatacctggccaagtctagggctaggtctcatattatagtcagccttggccgtggcaacatgctcgtagctggcttagggctttccgcgatgatgcctttcgtatctcctgacaaggccctgcaggcacgggatgccgttgctttactcctgtaaagcaggaagctattgcccttcgtctttcgaccaggcggggcctgttcagaaaggtatggtagggcgggcaaaacagcatacctacctggtgcctattctgaaggcgtgcacatgcttaccccggcaatataattggatacctaactgctaagccacgctaagctctcgactaaagagtgattcacataccaagtagcttaagcggctgttgaccacgggacatagcatcatgatagtataaatttcatggccgcacgtgggggcctaatcatgtctgcaatttccggaactccgagatcgttagcacaaagccaatgtgctgggtattgctttctcagcaaaagagagcacgtgtgtgaagcttttcgtcgtactggatcgttgaccgtgttggcttacattggcttacggtggttcctgcgttagtggccccgtaggtatgtagtcccgcccgtgcaagtggccaagggcaaacatcgtatattctgtataattatattgtcaagcaagatgcatatataaagggcagcttgatgccatgagatgtcaagttccaagcctttcatagttatcactgcccagacggggattacactatggatctcagtcgccgcattctatgctttattttgtacggcggcctggctgtcctcgcagaagctacgctgccgggacatagtacatgtatagccagttcttcagccagcactccggtcaccgctccaactagcactacaccgtcctttccatcgacccctccacctattgtgtaccaatggctctatggccttgttgcccccgactgggacggtatgaactgctctcttcctgctgcaactgacagtgacatggaccccttggagcggtgggagcagctcaaagtcgaagatgcatggaatgctgcggtagacaattggaacaccaagggtaatgacggcggaacgcaattctcccagtcactcggctcgtttttcgaatatacggaaaccctgttttgcgagaacctagccgataatgatggctgctccaacctccaagtcaagtgtgatgagtttaaccaccctgctgggtacatgattgtactctccatgatctggcttgagcgtgtaagtcattcttactttcatgaaacaatagtgctaataaacgtactcagcaatacttgggaattaatagcgctatcaccgcgggcagtaatgctgtttccgagcagctttcggatatgcttgggacctttgcccctttgaaagaggagggtcttagtgttgacaatataatcttggatatcattagcctgggcttttccctctctatgtcaccgatgtggaataaaggtaagtctacctatactgaatgaacccttctggtgttaatcggtctcgtcaaaaagttttcaaagaatcgaaactcgttgctaccaagatgaacaacaaggatttggccaatgagctggggacagtcaaagactgggtaaacccgctggtcacacggcgttcttgtactcgcctcgaaggcactcgaagcagaagaagaagatacaggcaatcaggaacgtttcgtctcgctgcgctgtctcaggctgtattgacaccaactctcgtatggctctattgtagtgaagcagcataaattgcgcgtcggtgctgtttgccagagggcctctcccatggaggacaaaggaccgatggagagagcccaaggcgacggcgatgctcctcaaaatgggctggtggtacgccacgcgaagtagcagaacgccgatatctgcggtgaacgcctgggttgtattctggtggaagaattccagagagcgatactcatcctcgctgatgaggtccggcgactggtgggtcttccacatgcgagttggcttcgagataccggggacgtgctgtactacccggaggctatttgacgaggcaccctcaggagaccctgaatccaaaccatctccatagccatcacaccttcttcctgcattctcgcacctgcggcaagtaggtctcgtctcgtcgcatttgacgcggcgggtcctgcagtgccttatggttaatagcaagccctaacgggaggacacaccaggaactcacttgcaggtaatgcaaccattccgagacctggccgtcggcacacgatcacttggagaagccatgatcaatatccaatatcctctcgatagctttctcatgaacgcctcggtcggaaagctggtcttgtactggcgcatactctgggccgtgcatgagccgatgcactgcccccgcgtgaagcccaattgccccattgctttataccagctaaacccaccggtctttaacaggcaaatactttctgacttcatggtcttcggtccgggattccttggactttcatcaggccatgcgccgggtcctggcgggatttcccaacagcccaaaatacatgggtggataggaagcaccgtttgacaggcacggcccttacctaaatcctacaaggtagactgctagtaaaatgtgacatctggcagtgagaccaagatagaaagctcactgggctcactgtgatgtgatgttcatggctcgttggggtccgtttatcgcaaggcgcagttcatcctccacgctttgaagataaccgcaggaatcgtatcagactcaatgactgtttatttagcctataacttccagtcttgccaaacaagcctcggtatttgttccgtcggtattatgcagtcccttcggttatcagcgcacggagtacgaaaagcctgggctttggggggcgagtgttcctgtgcttgtttagttaatctatggtagcgccattaattttgagcaatatagaagggtaaataatagcgagcaacaattttacggttgaatagtgtccgtggacacatttctgcaacggacggtgtttgcgatggtcgaaatatttatcttcacatatgaataacaggccgacggatactcggcgatgtcgaaggaaagggagaatgccacgaattataaccatcatagcctcatactgttcgttcacggctatcttctagcagatgtgctgctcaccaccgccggtggtctcgaccagcggcgatcggagacaagtccgacatttaaacgccaaaatccacgggccctctgatgctcaagaaacagaatttaattggacaatccactacactagtcttctgaatcagagagtggagagctcgcccggtgttggagcgatggagccagtgctgagccagtgctgtgggggcgagatgggctgaccgagtgccagtcatcgcagaggctctcaaatgtcttcatcctcacaggcgcaatgtcgacaagccagagctctgcccagaaacgaaaaagaccgtcctcggcgtgtaaacggtgcaaggaccagcatatccgatgtgatgcggagacgaaaggactcccctgttcgccctgccggcgagtgggcaactcggattgtcaaattgcaaagacgaaaagaacacggtatgcattcaccactgtagaagcagataacgactaatatagcctgcagaggaagcaatgggcgattcgcaaccagcgacctggccaccactgagtccatagcccaacccaaccaaacgacgcgcatatcggatcgagttcccccattctcgattgacgtcgtagccctgtgcaatagccaccgccgaagatgttatttgtctggtgatggatcattgagcggccaggatcgtttgtatgcaagcacgcgccatcgtcaggcgtccgctcctcccatctggggcgagagctggtatctgtcatatgtgatccaaacgacaaacagcgaccaaggctgcttatatcggcctatacaggatgaacaaggaaacactgcggtggctcaccatccacgccgcgatcacaggtcgacaagcatatcgcagcaccttctgccccctgcgcagctagtcaatgacctgctgcgtggctacttcgttatattccacccattctgtcccatcctagaccgggaagcattcctcggttccgtgagcgatgggtcagtgtccaaggtcttgctgcgctgtgtgctttttatttcctcgatccactgcgatttgaagacgatacacctcctgggttattccggacgtatagaggcagaagacgatcttttcagctccgcaaaggccgcttttgactgcgaaccggaaggggatcgtctggtcatgcttctatgctcttatctcctccactactggtccggatctgccagccagagtagagactcgctatggtggctggctggcacgattcgttctgcacaatgcatgcagatgcatcgcaaggcccagcaaaggaatttccagccagaacaagagcgtatgtggcgacgcatctggtggttactatacgtacgtacctttacctggatcttttattgccctgctaagccatttcgaccagattcgtgatagacagatatcgatctcgctgggaaagcccatgatcatccacgactgcgactgcgatgttgaactcatcagcgagggtgatcttgtggatgaatccccagaaacaattgcatatgtactggcacaggccagactatcaatcgcaggttagagacccaaccctgcttcagaggaacatcactgacggattagtctcgaacgcactgagaacatatttcgcaccctcaagggactgttctatctcagacgggacaatcgtacttgactctatatgtagggtgttttcaacttgggaagagagcctctcgcctggtctgcaatgtcgttcgactggcaatgcccagcttcagcttattctcaatctaacttctaagtaagtggaaggtttcttaatagaaaagcactaaatgtggtcagttactatcgcataattgttcatcagaccttccagcgcacattccaagaccggcaaccaaatacgaccacggccagcaacgatataataatggatgcagccgaacggattacctctatggctgaagacgctgtcactcatcataaaggaagccacttccccatgatctggtatagtccagcgtgatacgctgccaagcatagagaaagtgactagagctgatcgaatatccagtgtatcggccatatttgcagcaatgactgcgcaattcacgcacgcaaatgccacaaaccaatctacgaccaaaaggaatgcgctactggggtccatcaagtacaaaatgctcgctttgaaggattttgaggagtgccatgtgctggcaggctggatccgccagttgttctttgacatgtttgagcaacaacgtgggcaggacaagaatggccacagtccagaggccgcaggggaggacttcaacattccaaattcagaggcactagatacagttggggacacttcgatggccctcgacgttgacagcattattgccgacataccgcgcccggccccgtgggaattgccctacacgatgtccaatgacaatatcctctggcacaattggctattggggtatcaagacgggggatgatagcttgtaccccctccctaggatatgagatggcgtatctaccactctacctgaatgataacagactaccttacagattatagcggaaagtcggtgccttgtcgcccatttcgaatatcccatccgggttctggctggccgttgcttctccacggtcgcgtttagcattgatcctccgacacaggaaatagtagaggaccacggtcaggaagcccaatgccacaaaggccagcaccagggagtgtcccaggcgatacctgggggcgtctgttttcttgtagaaattggacgccgccgcgcctcctaaactcccaagcccaatctgaatcgccattccgacagcgcgtttcgtagccggtgcgtaattgttggacgacagggctaggaggcccggtatagctagactttattaatatatcatccgtgactactgccgaagtagtagaggtacctgggtagctgccactggcagcgataaagcatcctgcgtacgtcaagcctggaatgaatcgactgggggcaacggcgatgaggaagccaacaaatacagcgccatagcagacaagcgtgaagagactcctctggcccatccggtctgagaagtagcccacagcaatgcacgctatggaggcagcggcgtagacggggatggtcagcagctgcgcgatggcggaactatatcccaggccttttataattgtcgggaggaacagcgagagtgcatacacagctaccgcctggaagaccgttaagaatgttcaagtggtttgtgcagatgtcttaccgctccccagtagctgatggcgtgcatccatgtctagagatattgtgagtgccgctgttgtattaaaagggttgataactcacttgccagtctagaactgctgccaagaattgtttccagtcgaaagcactcttctcttccagctggccttcgctagagctcgctcgcgagtccgccaacaggtcgatgatgatggccttttccctgtccgacagaaacgtcgcggtcgatggctcatcccagatcacgaagaaggccaggaccgcgcacactactgtcaggagaccttccaggataaatctgcctcggatcagcttcatatcgtggataccaagtaacagcaactcacatccatctccatccttccaaccctccgactccatccatcttgctgatggcaaaggccagaagaccggagaacgccccggccattgaggcagaggcgaagatgagggcgagtctgaactgtgcatttgctcttgggtacctgactaggtgagcgtttataccgcaatagatggactagaatataccagagagatacgtagaacgcgaggccgggaactgtagcgggtcaataacaatgaccgagagtctgaatgatggatactaacaaaggcctccctccgacaatcctgcgaagtgtcagctggatagcagaagagggatgaaaatatggacgctggtgctcaccaagaaagaacctcgccgccaatagaccggagtaattctggacaatccctagaagcgttgtgacgacacctacacactctaaatatcaaatttcaaagactctttattatgcaggcacttaccccaggccaccataatagagggcagccaaatgctgggcttgaacctgacaagcaacaggttgcaaagcggctcgaaaaaggagtatggaaagaagaaaatggtcaaacacctgggtctgttagctcagcttgagggtaatatcccggcaaatcctaccagttatactgattcccaacgagattcaagtcagtcgaaagcccttggatctcagcatttccaatgtttcctagtcgagtcagcgtagaaattcatggcgacagaaggaacaaacctcggtcaaggaagctgaggaaatacaagagcgcgaggattggaatcacacgaaggtcgatctttcgcagcagccggcgcagctcggtagggcagggttggttggcacctccaacagcgtcaaccttcggcgaaggcgcgatctcctgcgacagggtttctttctcagaatccatctcgttggctatctatctagtcagaccgagcacacgagacaacgacaggaattcacgagtcctgcagcgggcgcaggcagagtcttagccttttagcactcgggggagggccgactctctccccagccgctaggggggatacaatgtggaggcggggacagccagccactagactggcctgtgcagcgtaaagacacggctttggcgcttgcaggattggagactgcggagagaagccagcagatcaatgaattggcagtgggccttttcctgcgcctgcgccgagtctgtgctgcattgccgaccaccgccggtggtgaatctggcgatgatctgcatatcaagaaataccttgtataaatgttggccatgctggacattgcctggcatcttattcggtccaggttgtaactatctgcaacagcgggactacaaacatggccgagtacgctcggtttcccagtcttccggacaatgcaaagcatgaggacggaactccggtgctgaatcgtcattctaccttcatcacgagaggacatgacttccctgctgccaaggtactatttccacttcgcagtataccaatcgagcgtcatcttacaccaccaggctatgctgtacggcgcaggagtccccgacccagaggcaatggcaaagagcccacatgtcggcattggatccgtctggtgggagagaaacccgtgcaacatgcacctgttggacttgggaaaaacggtgaaaaaggcagtgcaggagcaggacatgatcgcctggcaatacaatacaatcggggtctcggatgggataacagtgggccacgagggtaagttgatctaacacttcactacctcgaaacatccaactagttctctgtaggaatgcgattctcgctccagtcgcgcgaaatcatcgccgatagcatcgaaaccgtcacctgcgctcaacaccacgacgcgtgcatcgccatccccggctgtgacaagaacgtccctggcgtggtgatgggaatcgccaggcacaacagaccttcggtcgtcatatacgggggatcaattcagattggcttctcgaaaacccttcgcaagcgcatcactctagggtcggctttcgaagcagccggtgcatatacatacgacaccttgcaggacttggccaccgaagacagcatcaaaggcctccacaccaatgacgagataatggacgatatcgagcaacatacctgtcccactgctggcgcctgtggggggatgtttactgcaaacaccatggccacagcgattgagtctctcggtttgagccttccgggctctgcctcaacgcctgcttcctctccttcaaaaatgagggagtgcgtaaaggcggccgaggcgatcaaggtctgtttggagaggaacatcaagccgagtgatattctaaccaagcgatcctttgaaaatgccttggtcatggtggttgcccttggaggcagtacaaacgccgttctccatctgctggccatggcacgaactgcagacatcgaccttacccttgacgatatccagagcgtgagcaacaggatcccgtacatcgccgacctcgctccaagcggaaaatactacatgccagacctgtacgaaatcggcggcatcccttccgtacaaaagttattgatagccgctgggcttctcgatggcgatatacccaccgtgactgggaagacgctggcagagaatgttgcagggttcccttcactgcctgctgatcaagttataatccgcccactgaatagtcccatcaaggaaacaggccatattcagattctgcgaggaaacattgccccaggcggctccgtggcaaagatcaccggcaaagaaggaacgcgttttgttggcaaggctatggtttttgacaaggagagacatctcaatcaggccctggataagggtgagattcctcgtggcgagaacattgtcatcgtggtgcggtatgagggtcccaaagggggcccagggatgccagagcaactcaaggcaagcgccgcaattatcggagccaagctaacaaatatagccctgataacggatggaagatattcgggggcgagccatggctttatcgtgggccatattgttccggaggctgcttctgggggtcccattgcggtggtccaaacaggcgatgtcatcacaatcgatgcgcagaaaaaccagatcagtatgaatgtttctgacgaggaaatgaaaagacggctgcacaattggaaacccccgaagcctgctataactcgtggtactttggggaaatactctcgtctggtgagtgatgcctctcacggtgcaatgacggatcttttctagacagataaacaatatacactctactatcctgtgaactggtatggatcatctaccagtaattggtattagtgttggtccgtatataattgagaatcagaatcatgttcattcgcattggctactattcatatcgaaaccacagacatcacgcagaaaggtgtacagcaacgagtgaactaataataccaaagagacaaacagcgccctaagcgagaacccatctaagcgggtcagaaggctgacggtattaggttggatgaaactacttcttaccctcaaaccccagcgccccagtcaccgagccaagtccaaggccatcgatgagcttgtcgattccaagtccgcccagcagtcccttgagaagacccccaagcccaaggccgtcaagcagcttaccaacaagaccgagtactccgctgagcaagagcccaacggcggcaatgatctggaacaagggctccgatagcagcgcccacagggggttgatcttctttttagcatggggcatgtcgctgatatactcccggcccttttcaatggtctcgacaatggtctgcgtcagctccttgagcaagtcggccagttgatactcctccggcgtggcttcgtgcgatgcactgcgagcctttgcggtagctgcaatatggccgtctggatcgagtgccctgagggagcccttgcattcttgcagcccattgcctgctttctcaatcaagggctttacgtcttttaccagctgctcctcgtcaagttcttcttttggcgtgcggctggctttttcagtgcgctatggccgtcagtatgatatcccagggtagtaaagagagacaataaggagagcttactgaggttatctccttgcaaattggcccaacagagtcgattgtctgctgcagaatggtgcacatcttctttgccagttctgcgtcttctttctccttcttctgcttctcctgctcctcaggggacagctctggctctggctctggctctggctcctctggtttgtatcgctctgcccggcctataacattgccagtcttgtcaatgacctctccatcctcgtcaacagcgcgtcccatcagtcgttgggggtcgccttcggtcagcctgccgacgacttcgcctgaagggtccatcaccataccctccttgccgactgtcaggccgtccaggccaaagaagatcccctctggcttttcacgctcatcctctgggatcagctctgcctggccaatgactttgccgttgtcactccagacctgaccgtttccatcgactttcttgccagacagcttcttcggattcccagcaacaatcctccccaggatggtgccatgctcgtcgacaacattgcccagcttgttgactgtgcccccttcaagggcggacaggtcctcctcctcttcttcctcctcagggacctcgtaccgctctgcgcggccgttgacgtttccatactgatcgaggatctcgccggagatgtcgacggtttggcctcgcaggctcttgggatcgccttccacgatcctacccaccacctcaccatccgcgtcctcaatgtatccagactctttgacagacagctctcccaggccactgaaaggacccagggattctcgctcgcccttgggaatgagctgcactttcccaatgacttctccatcatcgttcagaatttcacccttcttgttgatgcctcgaccggcaacctccttcagctcaccttcgacaacacgcgcaattggtacttggtcagggcccattacattcccatgcttatttggcttcaagccttccacagaggagaaatccacttcttctggttcaacctctggttcttcccacggctctgcgcgtccgatcgtgttgcctcgtttatccaggatatcgccatcgtcgtccaccgcgtacccaacaagtcgttttggatctccctcgaccagcttgcccacttttctcccgttctcgtcttggatccagctgtcctctgccacaaagatgtcacctaactctgaaaacaacccaggcttttcctcttcaacctctattggtttggccttgccgatgacatgtccttgattgtcccagaattgaccttcactgtcaagttggaaccctccccgtgagagcttcttggggtcgccttcgacgagctcgcctacaggagtcccgtctgctctgacaatgctgccgagtttgttgcacgtcaacccttccagcgtggagatgtcgggcaattctggttccgcacccagagatactccctctcctggttcagcctgatcttcctgctcgtcaggctcttccccctctggctgctccgccgatttaccgacggcctcttggccctggtctttcagttctcctgccttttgctggatgaggtcaactcggccgatgaggtccccatcctcgttaatgatctcgccattgtcgttgactttctgaccagcaaggtctcctgggtctccttcaacaacttcaccaatggggtttccctcgttatcaagaatctttccaccttcaccaacttcaagtccttccaggcttgatagatcttgcgcctgatcattgagttctcctgccttttgctggatgacatcaactcgaccgataagatccccatcttcgttaatgatctcgccattctcgttgactgtctgaccaacgaggtcttctgggtctccttcgacaacttcaccaatggggtttccgttgttgtccagaatctttccaccttcaccaacttcaagtccgtccaggcttgatagaccgagggcctcttgcccctgatctttgagttctcctgccttttgctggatgagatcaactcggccgatcagatctccatcgtcatcgacaatctcgccattaccattaactgtctggccgacgaggtcttctgggtctccttcaacaacttcgccaatagggttcccgttgctatccagaatctttccaccttcaccaacttcaagtccttccaggcttgatagatctagtggaactttgtctgagatatccggcgcttccggaacctcgccggcttggggcagaccggcggcctcctgcccctggtctttgagttctcctgccttttgctggatgagatcaactcgaccaataaggtccccatcttcatcaacgatctcgccattactattaactgtctgaccaacgaggccttctgggtctccttcaacaacttcgccaatagggttcccgttgctatccagaatctttccaccttcaccaacttcgagcccatctaagctggataggtctagtgggacattgtctgagatatccggcgcttccggaacctcgccagctttaggtacgtcgtcggtctggggcaggtcgtcggtaggtgccttgtctttggccgtttgagcagcatcttgaaccttctgctgattcagggtatcgtcggcttgaggtaagtccttcttattcgttgcgcccttggcagccttgagactgtcttgtggtttcttatccttcgcagcacctgctttatccttggctccttttgcgaggcgtccagatggagacgcagctgctgcctttccgcggctgggaagtgaactcagctccgagcccgacccggatgcatctgtcccaggcttctcaacctcgggcgcttgcttctgtctttgctctttgagcttcggtggtgtaggcttggcctgtttggcttgggggaccttctgtgtggcgctcttcgcgggcgccgacggggctttacccaggggtttcgctttcggacgtgctggggttgccattattttggttgtatatacaggattgcgtgttcgaaaaagggttttcttttttttatatagcacgtaagctgtcctaatgttgctttctgcgattggcacggtagtaactcgatgttttaggtatagtataccaacgcgccagcatcaaagtacggcgaatcgcgataaatatttttaaagtgatcgacaatctcccgatcatccagatctcgccatcaccatcgccatgacgatcccagtcccatcacctctgcgtcagtttgtcgcggcgccgcactggccgagccctacgacagtggctgtatgcacgccaatcggtacctaccgacgacagtatatgacaggcgcgatgacagccagaacagaaacaaccagggatccagtcgcacgcgcacagtcggtgccaccctgctgggacgaggtcataatacaggagatatacgaggagtggggggttccagacccacagagactacgcggcttgttcaaaagtcgacggattaggcaaatttaggagagcaagtctgggcgagccatgattcgggtcaagcatcgcggggaagcatcaacggcgtatagaaccgttgtggatggtggtcttagcacactgctcccagcatacggagtactggtacttgatatctattgctgacgtgggtacggtacatatagcatctgctcaaccacatctcacggaataaggaaccggcgcatcgagcgagctggatatatgcacatgatgtaaatcccacacgtcgtatgaattatcttatcgtcatgagccctgcttggtgtacacaggccgacctccaaggggttaatgctcttcatgctcaccaggccgtgcagggaccgtcacatatttgcaggaagacatcattcctcagtatattgattaggaactgcatgaaattagaaatggtctctaaaagtagaaacttgccaggccaaactcacagcaatgccaacgttaaatccccccgtatactagctttcaggtcaacctcgatgtcgaggtttaaatcaagtcgtagtttgagcccagtgtcctcttcctttccttttccctgtgcttgtcctccctgttgtgctccttgcccttgtatacgcccaaggccctgtgcctgcgacgcgtctttgttggacagctgttgcgacctgttgccttcgtatggttgcattgctttggtttcatcttgaacatcttcctcttctgaggcaatcttgggtttttgttgctgacgccgcggcctttgtcgcactttcgttggtttcgctgctttcggttggcgttggggtgcacgctcttgttcatcatctgaatggatggtgtagacatcgtcattctcgtcagcgtctccttgagctgctttaccagacatattcactgtaggactatgcgaggagcatggaatatcagcagtgttaagagaattgcaagctgtgcaactgcgcaggcgcctgtgtccgcgatttcagctcgcagtagaacggttcaatccagctgaataagatgatgctcaccccttttgcctggtaaattagtgctcaagctggctcgccactggaggtgttgtcggtacttttctgaccaagaagaccatgcgtctggccttaatcgacgaagcaatgacgccgtacccatgcaggcatcccagactgacaatataatgatgcgcgttcaatgacctgccggcctaccgaaccggtattctcatccaataccacttttcctagttgctgcagttacgtagatgtggctgagaccagtcccgaagcggcgcaggcgaatattgatagatgccagccttccacaacgtgtgtgccagtcccactgtttgtagtttgccgtttcacctatcagaaactaccggtcctgacatcaatactactgcatcaggctatcacagctgccactgctgctgggctttggtgcttgtcttggggcgaattgccaatctacgtaagtatagacatacctgaagcgtataccacagaacatccaagagctgtatcgtgctgcaaatactgcgtcccacaatgtcacagaatacaaagaataatcctacagaggatgcaccgaccgggaatgcatcccccacccccgcagccaagcgcaagccccctaagctcaggcaaaagccacccgccgaggcagcagcagacgattcgggaacaccaggaagcacaggtacccctcaacctgaaatgaacgataacgttggagacgagaagggcacaaagggagataaggcacctgcagataaccaaacgaatggggatgccccccaagacgaagcccagcaggatgcggaagatgaaagcccgggggatgacgaccccggcgaaggcacagcagaggaaaaagagcaaccggaagacgacgaagacgatcctccaccagaatcaccgccaactgaagagataggttctccagagccagaacctgagcgggaacctgatcctcccaaacgacactaccgtccgaggcggaccgtcacgcgtgagcgtgaaaggaatgcacccccagaggtctggggtaaacacgatcaggaccaatccggtcaacaactctcccgcctggctgatgttggacagaccactgaccaggttggggagcttgcacaggacgtcggtgggaaggccgtgggtgaggttggaaatactgcaggcaaggctctgggcagtgccgttggtggccagtctggcggggaagacaagggaaaggaggagcaattgagactgcgactggatctgaatctggacattgaagtccagctcaaggcgaagatacatggagatttgacgctccagctactgtgagttccgtgcatctagttgaggttgtatagctaacggtgtgtctagtaactaagcatgacggcctcggtctagtatttattctgtacttgtatccagtccgtctctactcgtatcaatgtctttttcaagtttgtgccattctacgagttggtgtctgaagggctgtgtatatagcaatctcaagcgacctatcatgaatgaatcgaatgtattcaatgagagtccgtgtacaaaacctgaccatcagcactattatcaatctgtattgagttacgtactaccagacagtaccgttctcgcctcctctctgccagtgactggaatccgttgcaccccttgtacaccctgtgggacaaggcccggatcgatcaggccaacctggcaaagcacgctcgcttgatcccagtaaacattctcagaagatattttgccaccgataaaacgtgtaatgctgataagaatgacctccacctgcttgtgtgttggggcaacgcctggtaggatccatggcatctcctggctgtgcttgaagctcatgtacagctcctcaacgactctgtctgcgcccgtggtacgggaaagaagccttaggcgcatcgaggtcggcgcgttcccaccaaagttattttcgtagaagcgacgaaggtccgttccgcccgacgcgccctgtgccgttggttgaaaggtaacagagggggtctcgtcgcctgtatagcagccgatcgaacttccgggcttggatgaaaagtatcttgctgaggaactcaccattagcgactggacagataatgtgaccaggtcaaggaacatagtatgtgaaatgcataccttcctgggcctcatcccatactgcctccaaatcaacctctctatggaatgccagctgcagcgccttcagcgaccgactccacgccaactgcgctggaatgtgattatattgtttcatgtccttctctgcgaaccctggcagagatccactgtacacatacgcctggtaccccacgctgagacgatctcctgtgcccattgccgaagtgatacgtctgacttctctttggctcttatgcgccctcccagtggacggatataccacagtgacatcctgcgcggcaaagtgaattaggacacgaactgacgatggataggcaagctctgggtcgatgatcctcgttggatagtaagctatcagtgcgcagagcttactggtattcggcgaatggagaaaatgctccaagcagaccgcggcggcctcgccgaaacctgacagaatgagcgctgcattgttaaaaggataaggagacacacttatgatggcatatgattcactgacgcttaatcccgtctttacgccctcgaggtcgtggataaaagctttcttgtccttgacaagcggaaggtatcgaacgtcaaacccttcgagactccagctgcggagaaagctactgtcaaaattgtccctgtctgcggttatgcagagacgagtagccttcttagtcgagacgaaaggtgccatttgatctaccgtatacaagtaacgttgtcgatactcccttcatggagcggctggagaatcatacaggactgccctcgacacttctcatcctcaaaccccgtaaaggaaataatgcatgacgaacatactgcagatccccttctcgaaatagcccgagtcacgttcaaagccacaagctccgactgatatcatctacgccaccaaagaccatttctgcgccggaacaggctagactgccactggagctgtccagcagaccaactcggttttggacacatgtgcctcgattattctttaatattcttgaaacctattaattaggaaatgccacgtcggtaccataaagggtgattaacgttttgtgcaaacgctggctgggtgttctcaaaccgctgggcaggggtgtggccaagccggaatcgcgaatatgacagaattccaatgctgattctcactgtctattatttctgtgccagtgaaatctacaatacctgtgagttcatatcccagactagatagatacagaggttgaatctaggtgctgggataccctcccggtgcactcaatagaaaagaatctaacaaattgatgcccgaccaagttattacaacgcgaaggtattttcaaagtaatcaataaatccattacagacccttggctacccgtaatttactttgcccgtcgaattaaagacgggaagttggagaagccatcctcctggcggattgtagcgagcgcgctcactggctgtacgtgtcctcggcctcttgaagagtcatgtccagactgttcttgttctgggtggcatcctgagcacaggttggcacagtgtcgatgataccaaaggcaagcgtgtcaacacctccctccaaagcccggagcacgtgtgcaatcggttgggtgaagggggtcaggctcagtaggccacgcttgccgatgacagtgttcaggagttcctgatgcaccatgacgaactattccagttgttagtgccgtccaatggggtgggctcgtttttgggaaatcaacatacggttctgaaagcattgcagatgccctgctgctcgctatcactgtaggcaggggggctctgtctcttctttccaacagtctggttcaaaatattagcaccttctctccaacgagacacactggcatattcatgacgaaccttgacagagcgcttgtttccaagtatttggccagggtccgcaacaatctctccaatgtcatcaacacactgctctgggtctgcaacatccaaacattcctggcgcgcccgaagagcgcgcttatctcctaggatctcactggggtcctccacgatttctccgaggtcttcaacacacttctcggggttctcaacatccaagcattcctgacgagctttgagagaccgcctggatttaccaccgttcatggaagtgatatcatcagtgactatctggattatatccttaaagtcgttgatcaattgctaaggaagaagtaagcacgaatggccttataccagcagcccttcgggacacatatacgggactgcgtaacatacagggccagtgctgaagaagtttgtgatggatatgctcttggcgatatcgttggtttccgatgacttctgggtgatctggtcgatattggcggtcatttgcgaagcactgacctgggcagaggcagaggcagccagacccagaagtgggaaaatggacttgaagtgcattctgacggtgtttatcaagggtctggtgaatcaaatgaagagactgaatcttggaggttggtgtcttcctcagaggccggatacttggggctttatatagttcttcgctgccataatttccaataccctccctctttaccctactcaacaaactgacatgagcaaacccacaatttccatcgctcgaagagatgcaaagctattgaccctgctaatgtgcggtgatgcattcgagccgctgtatatggaaagaactctgggcgatcatcgccatgaagccagacccagcgaagaggaccagcaaccatgttaacaaattggagaaagagtgctccagagctgaggctgatcatcaccgtctggtcctccctgaccagtgcatattgaaaaaggttcctgcagccgatcattgttccagcggagattaacctcgtggagctgccgcaatatgcaggcctcactggccatggcgaggcttggcctggcggggcatgaagatggttgggtctgccctgtccaccactccacatgagtcaaagcccatttgggatgtgatggcaatgcttcagtgttgtctcgtgggccctgcggagcggctatcacgtcccggtgttcctagtggcgtagatccagttcggcggcacggcgtgccttgatttttgcagtgatcgactgccaccgtatattcaagctccacgttgccttcggtcatggcattagtttactggataatatagaacgcttctttgatcatcccaccacagtcgatgtccacttcagctcgccgccacgggctggtagttcatattcctaaatatttggccatcggggtccaactcgtgtagctggctgtatcatgggggcgttatggacgtattgggcgattgttgggacgtaatcttttcaaacgctggttcacaccgcttgtattctctggggtacaattagggcttcaattcgaacagcaacggcactgccagtggagctgaatccgaccaacttaaatatatggagatcaatcagtggatgaaattatgcatggcctttccttcgctcctgtactgtgctggcaagcggagagtcgagatacaagttgagcatgacgtattgatatttatgaggagaagagtaaataagccatttatttgcattaacatactaatttccatgacggatgagagtaccccgaagcaaccgacggtggactaaaaggtagccagcttatccctcacgttgatcttagtcttgtttatctcgagatcatcgcggaacttgactccgttctggaatacgatggcgatgtccgacccgccaaataggaagtacgagattttatcccctttctgcacgcagtattccttctggacgctcatcgccacggacgagacctgggccattctgattagcaggactgcaaccttgccatggacgacagtgtcgatgatgatcaggcctcgagtctggcaccactggtagcccgcatcgtctggggcatccagcgatcgaaactcaaccttctttttgtggtgccttcgggatatctcggtctcctcacgagcgaggccccggtcagccgctagccttgcaccatctcgtttcttggttacttagaggtacacctgatcttgaatgtgcttcacttggattaccttgccgtttacaggagcgtgctggcggcggtagtcctgggacaagagaaacgtgtgcatcaggctgccattgtcgaaatccgggcctaggcgctgaagcagctcgctaacaggccacttgattcctttgctgtaatagcttggttctcaattctgacgagtgttctcctcggtgtcccatgaaccacggaaaaatggtgtcagcggcgtgcacaatgagcgaattgttatcaaccccagctatcggacgggttgatgcccgcccacgtacgcgagaagaactcattgaatgaaccacattcccggctgggcggtttatggtaaagcttgatatccttactatagataggcttgttgtaaaagggctccacatgggcagcagactccggagtattcatccagtgtcgaatctctcgtgccaaccccacgagccagtaggaatccacgacaggtccgtgttcgatgtctcgggcagcaatggcgtctggaggtttcggacagacggatgccctgaacgccgagtaaaatcaaataatactctttccatatagtttcttaatcgcataaaccggagttgttccgctgccattaatgactatttgatattagaaggtcttttattttattatttggaatgtgtaagcagccgacgcgggacgagcctcccgcagtgccaagtccgacggccactcagggcgcgccagtggggctgccgtattcggaaaggcaccacaaacaggaggtggggggcactctccaccactcagtcctcattcctgtccactgccagctcctgaatggcacgggtcggtgcggagtccaggcggcaggtcgcagaaggtcaacatccgagaccacaagtaacccgagaagccagaggatgttccccgcgtcggatatatatttccaccacatcaattaaccacaatacaaccacgttccaaatgacacagatacctccgctcaacatcgcccagtcttcccagagtgtcaatgtccatgtgatagacacgacggtgaagatcgatggccccaccgatttcttcctcaagcctcgggtgggcaacatggatcgcctagttgcaaacgcattcacgtttttaatcgagcatcccaccaccaaacagaaagtcgtctttgatctcggagtccgaaaagatgccaacgaactgtcgagccctttctggaagggctttcgggtgaactttgttatcgatgtcgaaaaggacgtcgcagacatattgcaggacaacaatatcgacctcacctcgattgatgccataatttggaggtgcgcagatactctgaccggctgtttacctttctaactatgaaaagtcatcgccacgcggaccacaccggggacccgtcaactttccccccgtgcgtcgacttgatttttgggcctggggcgccagccgccagactcccaggatatcctacgaaccaaaagagctcgctcttcgaggccgactaccagggcaggaagctggtagaaattacacaggataaattcgatctgcaaatcggtgaattccgagcctttgattactttggcgatggctctttctacctcctcgatgtccctggtcacgacatcggccacgtttgtggcctcgccaggacgactgctaacggcacgcaaacctccgaagacgacagcttcgttctcatgggtgccgacacttgccatcacgcgggtcaacttcgtccttcagagttccagccgctaccatcggagatccatccgcacccgaaggactcggaggccatgccggcgccattcgccagtacctgcttgcagaagatacaccccaagggacagttatatcacagttgtccgttttacgaagtgggcgtcttagagaatggcttcagtatgtcggagtcgcctgaagtcaccgcgcagagcatcgaaaaaatgttgccattcgacgccgcacctaatgtgctgcttatccttgcacacgacgtaactctacaggacaccgttaatcttttcccagccatggttaacggttgggaagacaccgcgttaaaggacgaaaccaggtggcggttcttgcgagattggagcactgctttcgaatgatggacgagatgtatacatattgtcttggatggtaaattcaggctgatagtggataattatccgtgattgaatgtggcttatatgttgttctaccagtatgacgaagcagagttgaataagggatgtttggtgcaccaaatattagagagcaggaactggcaacacattgttaaccctgcgaggctgatctaattatgattaaagataacgtcgttttggtagcaacaaaaagcagttcctttttgctcaagattcccagttcaaaccattcgcagatccatgacctcaaatcgccgactatcgctgctcaaacgtaaactggacctgagggacatctgagctatcaggtggcatgccgaatgtaatattccagaattcaaaattactgccaaatatcagcaaacagtgtttaagaaaaagaagtggatacttactgaatagcctcgcaagaacctcctagcaggccacagaacgatatctggggaatcggatcgacagtgccaccaacgacttcaatcttcagaccatccacatcgtcgaaaccagtaatatctctcttttgaccgagcgggttggttgcgagagcgaacgtgaatgtacttgaagagttcccaagcgggtaggtgaggttcagggtatatggagcaacatcggctttcaatgcagtctctgtgggatacaggctgaagtatccaatggactcgtcagatcttgcccactgaacgacagaagggctgaaccaggagtaggagaaatatccagacatcgagtactaaggacatctccgggttgagatccgctctggtgaccggtctccaagtcagccgcacccgtagtcgggctcctttctcgagttgagacattctcaagctcaatgtcaaatatattgcgagatgttgcagtatatcgggagtgatctttgaccggagaggtggggatggctgttgctacagcaagaggtttggagggtgtgggaggtgaaagtggaaggggaataggatggagctgaggcccggaggacacattgtataacgtccagccggatgatgacgaggcgcgcgccggaggtttaaaaggcggtggagggttgtaaaaattaatgttatcaaggtcaatatacatgacttctcaaggtttccagagggattggtaggaagatttccgagcggcttagcgcagcgggaaactgatgcgggaacaaagtaatgaaggacaacttgctggaactcgaacacaaaagcaagcatgtgtcctttatagataaaagaacagaatcatcggaagtatcacgatatcagagcaaaaccggcgctgtcgaacaagaattcgaaaacatggaagtcggtccccacgcgtaggccggaagtggcgtcaccctgccatatccggaaccaatagggaaatacacgagatagataggcagaaagcaagagatcacacgacatcagacacgcagtctgtggaaccgtcgcacttccgcggcagaaacgcacgttgcggtcgaagaccgaatgtaacgtctcccaggccagcctgccaatcgttgaaagcgttgcgttgggaggagtgttggcgatacgtggaacgggtctgccacgtcgttctccggacaatgtaggacaattaggtacatgaggcatttctgctattggcgtacgggcttttctgtcacgggcagggaatgaggaacactgccaccatctaacctcttgagatgcaaacgggcccagcgcgcagatggggaccggccgtcgaataacgctgagttggcccaaccggaatcttcatggggactgtgcacccaggatagtaggtctactgcagtgatcatctcgtgtcttccagtaggactggcgcgcccacgactcgacatcagccagcacagtagcggaatggcctggcgccgcggacgcagccagtcggggtcgccgatggaaggggaaacgagggggaggggggctgagggctcatttccgatgtgacagaaatcaggaggccagtgggccgcgcgatccgtgcaaaatatggcagcggcgagggcagtagtggacgaaagagggagggagcattgaagcgacgcaccggacgtctttatagttgtcagggagcagcgaaggcggtgtgaggcggcagttccgtttcggggatggcgttcggcactaaaccggatatgagacgcactaaaccacgtaggggccgagggagacgggcgctaaacctgaacgaggggactgccgaaaacggccgccctctggtaaatgcgaattgtccgagcaactaattaggatacctcaagtctagctactgagacggtccctgcaggcagttctagaaggtgacttctagatctagcgactatttactacttatttcctttatggtttcaagtactacttcagtaatccttctgcatactagtttaattctctagtttcaaccactagagcgctccctagcagatattctggcctatctaggatctatttggaagtaggttcgaataggaagtctaggtatcagggatataatctagttctaggtggggcctagatctagcagcggtatttaattggtatattaaatatctgaagaggaggatcccctacctgtatccagcactagcctgtatttttctggatttttttcttttttttcttgctggctttctaggcgacctagatactccaagcagtattcctattgatttaattatttaaatttaaattttgatatttatctttaaattttaaataaatagatcagtaatattgggcggaatcaatctactagctggtctgtgcagcctggttttctagaatttacccttcccaaaaattctattggtttagtagttccctgcaaaaattactatttaaaattatcagctttaaagctgttcttttaaattcccccttgttaaaatatcctgtattacccctactgtatttgaaagaggaggaatatatatatctttactatctacctgcctgcctgcctgctagttctattactttaaatctatttcttttaggtttctagtattattctagctctaggattatggattctaccctgcccccatacctagtattccatgaatcctataggtttattgcatgtcagatccatcaaactgccctacatcctaccaggatccttgatcatgtgactcaggatcaccagggtgaatctatatttctagaaaatctagaccttttacccctagagattattcatcaagaaattcaggcatggcagccagtttaacctctgaaaggtcttctaccacctaggaatgggtttcaatgttctatctgcagtcatattcgacttacagtgccgaccgctatcgccttccatatcgaacaacagatagaagctcttttgaaccctaatcacatgatacgctagtccatatttggttaagttatatttcaatatctgtttcaagtctgactcgtatgacttggaacaagtaaattacgaacttgggtatctgtacatttagtagtacagatccaaaacatcaggccaaccattaaacaggtatcatctaccgcacgggactctgagtaaattaatcgtatctttcttgcatcgtccgtccacaggatagatacattcaggcttcggttacaccaatgatttcgccgtagccttcttacgttgacgctgtgatataatgatccagtttaagtcatacagaagataaactgcagtgatgtagccattttccccgaattccattacaggcatgcaattcgtgcagacttattatttgaaaaatctagcaaatttcttaatagcccgccgtgccgtactagcgttgagatgtgcggccttctcattgtttggcagtgctcgctggtacatctctgcctctttcagcttcccttgatcggagtagagaacgccaaggttgttcactgtatccagagtggacgtatgatctggaccgagggccttctcctagcctaccagtgctcgctgatacatctcttctgcctctttcagcttcccttgatttttatagagaacgccaaggttgttcactatatccagagtggacgtatgatttagaccgagggcctcctcctggcctaccagtgctcgctggtacatctcttctgcctctttcagcttcccttgatcagagaagagatttccaaggttattgactgtgacgagagtggacgtatgatttggaccgagggccttctcgtagcctgctagtgctcgctggtacatctcttctgcctccttaagcttgccctgatcagagtaaagatcccctaaaccatggaatgcccccataactcaatattgtcaactgaccaatctagatgacatacataattggcgtgtagaagaagccgttgctaaagctctaaatagtccctattacttacactcggtatagagtatctaacagatattactgccagtttattaagctgtatccgattcacgtcgttgctttcgttggtaatatataggcactagtcttgtaccactaggtatatcgcatagcttccttcttgttgcttactcttaagaagagagaatccgataagagactttataccgattttaaactcaagtccgcttgatatagcctttttgagccagtccgggacgtttgagctgtgacggccactcttcaccaactcgtaccagatatcacgattatcgaaataagcaagtagcaatagaaggtctactaagtttgggtcacgcttctggatctcaagatataagatcatccatatttgcagcatattgccttactggtactgacgtcctggattcgattgcagctgtagcttagaccacgattcttggtagtgttgcaaatactcagtgatacttgttctagtttcatgtataaacgccccggccagaacaatggctaatagcagtctatacagacgattagcaagagcaaggacatctacatatattagcatatcagtaacatctattcatcaagtgccacagtacctaaattgctatcaagtttactagtagtgtttcttaatgatacaccactgctttgtaggagtaattaaattgagctataagagtcaagtctacgaactgggaaaggctcccctagctcagtcagcccttaaagtcgagaagtgataaggatagagccatgatctactttagggaaaaattccgcaatatcatatccatcactaatagagctatcgaaggggtggtatcgatcgacattatcaaaaatgattagccagcgcgagttaccatccaatccaagccaccgcaacatttatctggctcgttgctctacatcctcgtcattgattatctcccggtcccagtactgttctggtaatcggttcaaggcaaagctcaacgattgcaacagcgcatcgcagtccttgccatacagccagaatatcgccataaaatcatctctgtaatctcgcgcgaagcgaatcgctagctacatctttcctattccgccaagcccgtgaagaattgcaacttttcgcgacagtgaatctgtcggttgtaaatactgccacagattgtctatctcctcttgccgtcccacaaaatttgcaatcacagacaatgcggtcaggtctagagggacattaaagcggtagactgcacacagaaatttttatttagtcatggattcgaactaggcaaggagtgatacagattgaaacttagaaacccttactatgatctgctagagtgtctcgtgctgttggagtagttttaacctaatcgatcggaaccaccaagacaagttctttagcgtaggctgctaccgccattgccgcatatccttgccattccttatttttgtgtgcgtccgcatagtcacaaataccccggataactaaacaaggaaagtcattcataagccccgccgcttccatttccacacagtacactcccaggtcctgagccagctagtctcgccgtctaccgtctttcactacctgatttgcagacgcaatcagcccatagtgaaacactggttctttatggtctcgtggacgccttggcttcaatttggaccgatcacaaccgatacatatatcagatactccgtggtcatagtctatttcgtataaaaggtcctcttttattagtcgtgtaaaatttgcagctatacgcagcgtcattttagctcagaccttagaaataaattcaagaattcgactttcttctgtgaaatggtaggcttgaagtatagcgagggcagtcagcaggaccttagggggccggttaagcatccctgtccgctagaattgaccaccacttaatactttaccaaggtcgtattagatcacacctccagatgtgtctgttggttggctcaccacgatatcgccaagtcgaacgtctgcattaccgtttagtactcctccaccaataccgaccatcagactgaaccggatagagtagaaactcgagagcaattgcatcgcgaccgttacagctaatacgatgccatatataccacttggtaaataggtaataacgacattgtggtccccgatatttcccagaatatacgtattttgatctgtaggcaagcgaggcagacttaggtatattgtgtctaacatcagctttgcggccgccatctctaggggtaaagcgcatatccacccgaccatgtaatcgtcataggatagagtggccctggctgccataatagaatatcaaatggttggcttttagagactgagtacgctattattagttcataagaactgcgagacaaaaatgatatcgaaccccagtctcacgaatggatggatgccgtggttgttgagaggaggggcggggtcggcccccagcgagactgaggcgaagtactatcacgaccaatcattcttatacagtggagaagaaattattaacagattgcctgtttgaggaatgccatgtttgctcattttacatcgaatattccagtcacataggcttctagacccctgtaactaccatacgagtatcataaaattcgtacgatttattcctggttcggtataaaccagataatttacacactatctatatctagattagcgcatcctatatacaagttatgtgaccttcctcctattgagaacccagtaatggtctttggaatattaatcacatgataccctaatctagatatagttatagctgtatttgaggttgtcgttccaatgttgaatggtacatataatgccaaatgatagaatacaaaattgaggaagtcgtgtaggtattattacagccccaagaatactcacagcccccacgatatttcccccaaaacgactgtctccattccagcaccaacaacgccccagcccgcttcaatatggcacgtaatctcaaaaattggcaacgtcaatccattgttcatatgacacgcagcaggaagaagctgaccatttcacaaatagccaaggtggccaagtgtagtaagcgatctgtcactaacatacgcaggaacttgcggctcttcggcagccctcgatccccatcagtccctgccggtcagccatcaagcatcacttctgtgatgctagataccctttgtgatcacctcgccgaaaagcccggtttatatattgatgagatggccatttttttatgggatgagtttaatatattgctatccttatcgagtgtcaaacgtgctcttacgcgagctggctagacgaggaagaaaattcaacagaaagcgatagagtagaacacttaactaagagatttctactagtacaaactgtctgaatatcgttcttactacctggtcttcgttgatgaatcgggatgtgataaacgggtgaggtaccggcgaactggatggtcaccactgggcgtaacaccagtccaagtatctaagtttcaccgcggtcaacgctatcagatcctgccagcctacacacaggatggtatcatcctatctcgtatttttaaggggtcaactgatacagtgttcttcgaatcgtttataaagcaacttctccagcactgtagaaagtggccggaaccgaaatcggtgctcgtaatggataatgcctctttctactatttagaccgaatcaagtagttgtgtgctgatgtaggagtcaaattgctgtacttgccgccttacttgctagatttcaaccctattgaggaattctttgccgagctgaaggcttatataaaaaagtcctggtcagcgtacgaagcgaatcccgagcaaggttttcatatcttccttcggcggtgtattcatgatattggtgcgaaacaacagagcgcagagggtcattttcgacatacaggcataacaatagaaagggcctaagtgattctcactgtgaaaaatgtgtgcatatgttacaagtcagatagtgtgacaatacattagactaaacggtctctgtcgagaacagcgcttttccatttcgagaaaaagaccattgcgtagaatgcgcgagacaattaaccatacacataagaagaatgtgttatatactgtagtaaccaatgtatattccgttgttgtatacgccaatatctaactgcaactaccaatgtccgaagctacagtagaattcgaaatcagctttaacgccaaactcttttactctctatccccctgccccacctagatcgcgctatacctaatttgattagaagtggacctatccgattatttccaatgtacctttaggcagccgtcagaaataccgttattgaaatgtccggccaccgcttaccagatcctccccgaccctggcccagcttcccctctacctctgatgtcatcgccacaggttttaatactaatgacgagttcactttaaccaaacacgaattcgacatcctctaaacgagatatatacactgttacatccataaagccacaccgctataaatttcaaaattaatttctccttgaattaacatggtgtggcagagaaacagttactatccccatttttgtagtttaataatttttttgggggggggttttgaattaagctacatagttgtagaaataatcgattgtcgagcgagcacaagccacactgttcctaagacggccgatctcatcttcagcatgaatgggatcagcttccctcctaacattagagacttctgcgtcctcttttatcgtcgtattagctcttcggatgttttgacagctttcctgaactctgtagaggcctaattccagtgctgcgttttgaagacattccgcggatgatatcaactgacgaatgtctctatttagtctgataataaaaatcgtcagaacagtgattaaccttgacaagaaactccgggtatgtatttgcaattgactagcccaagatatattgtaccatatgaatcagggttaaggcttacagagcatgtctacctctgatgccatcgccacagactcatactcatacaacactaccctctttccactcctttgtacgataaattatcttcggtggtttattctgtgattgaaatactatcaggtatcgctgagatccataaaaaggacattgttctatttcagccgtcaccgagtatattcgcgataaatcatggaaaccgagcagctcgagcagaaccttgatatggccattttctcccaactactagagatggaccacgaagaagatcggctgaccagctcgatcgcattttatacgtttatcgaacgggcaaacaatactattgacgatatggaacatgctctgtaagccttaaccctgattcatatggtacaatatatcttgggctagtcaattgcaaatacatacccggagtttcttgtcaaggttaatcactgttctgacgatttttattatcagactaaatagagacattcgtcagttgatatcatccgcggaatgtcttcaaaacgcagcactggaattaggcctctacagagttcaggaaagctgtcaaaacatccgaagagctaatacgacgataaaagaggacgcagaagtctctaatgttaggagggaagctgatcccattcatgctgaagatgagatcggccgtcttaggaacagtgtggcttgtgctcgctcgacaatcgattatttctacaactatgtagcttaattcaaaacccccccccaaaaaaattattaaactacaaaaatggggatagtaactgtttctctgccacaccatgttaattcaaggagaaattaattttgaaatttatagcggtgtggctttatggatgtaacagtgtatatatctcgtttagaggatgtcgaattcgtgtttggttaaagtgaactcgtcattagtattaaaacctgtggcgatgacatcagagtcagaggggaagctgggccagggtcggggaggatctggtaagcggtggccggacatttcaataacggtatttctgacggctgcctaaaggtacattggaaataatcggataggtccacttctaatcaaattaggtatagcgcgatctaggtggggcaggggaacagagagtaaaagagtttggcgttaaagctgatttcgaattatactgtaatatgtatcggctgtacccatcagagctgggagagaccttgactattgcgcggacgttgtggttgatactattacgatataaattattgtgttgtgtgccgagcgggagctaacgccagacgaatggcggacctacccacgggggctcctgagccccttgccaccataaccacgcgaagaggcatagggatcgttgtaacagaaaaccttgcactaacgaccacggtccggaccaggagatatgtatgagtggaaagcaagcagacctacgcggccctggaacccgtagaactgactaatactggaactagcactagacgagtgataactagagagatttagcagattattgtacacctgtaatatactattaaggagtaaaccacacttattcacaccactgggactgaactaagagaagtgaaagataactagaacgagctctaaacttagaatgagaagctataggaagagattacagcgctacggttatagataaaggagaggaacgctctaaccttgatataattataggcggctgttacggctaatacagataatctgtaaccccgggagacctggcgataaactaataaagataagaactatatctgaatcagtacctagcgatctattactaaagtattaggcgtagataataacagagatacgttcggccgctatctccctaccctaactgcgaacgcctatattaggatagtactatcgaagacactatctacctaggatatataggttacagggattagtactactaaaattggatatataatccgatttaaaaactaagtattggccgaaacggcctacactaatactgagtggctgaccgagctaggtaatgatactagactagtaaagctacgtttcaaagtcgctgtttactatatcctaacctttagattagaccttgaaaataggaaaaccaaagccattaaaaagattgtaaataagaataatcttaccgactatagatttcgaattgaagatatagtctagctaaagaaaagagataaagaactaggaatatttgccttaataggtatctggtttaacttactagaggtagtagaatagatactagacaatagcctattaattaattaatagtatattagaagagtagaaaagtatgagattaaaaagaaataatacttctaatactaaggattcggctatctagtatagttgtataaagagataccctaatatagccactgtagcggctaatataagcgagaaagatatcccctaggtatcagagcacactacttggaatatagtagggaatatctgactagagacttgctatacctaatgctagctacagtacccctattgtaatattagataataaccttagaattctataactaaatactatgaaatcgagagtaggtatagaagctcttattaacgactatcagagccagaaactagatatactccttatctaagaactgtcgattactacctaccgaatatatataaaccacagtgtatagtaactctattaacctatagtagaaagcgatttggtttaataccgaagccttatctatattaattataaactcttaacctcctcttactaataagtaagatacaattacccagatctaatagtaattaaagtttagatagccaactcctaaatcctgatcttctcagtctatattctgcctatactaatatatacgcctaatagagtatcggcggagacgaccttatcggtaatctataatactatttaaaatgttatataagataatagtagaacctttagccttattttagctagagatttcaattactaccacctagtataggggagcaactatatttaaccttaatttattgaggacgctagggaattaattaatttcttttataattatagcctttagagctacctcccttagggaactgtaaccttctagttattaagctacctaggaagaagttctataattaactagatagtaataaacagactagacctactctttaaatactacctctactataataactatagtttagattactaaggcacttatttagaatggtacctctaagtgcaacgcaaccctactagtaagataagaaaggtatataaccgagcggactaggagaagattggaaaggagatctaggaacttttcgagtaatctagggagttagacttagccgaggcgctagatacagttatagagagacttataagtacgatagtaaatatagtcgataagtatatatctaatataagaccttccctatactctaaatagtagtttactactaaccttaaagcctaataaaaagatataaaccgcctataacgtaagtggcaagagagctatactaagatcagataagctaatatccacactatagctatattcgaagatatatactagatatagcgggtatagacttagactattaagaaggctaagatatcctattaaaaatagttcctagataaagtaggagaagggaaattatagaaggtagtaacttatataaaactacgagattcctagggctatattcctacccttaaggttggcgatatagagctagttaataatatagagaaagcttaggtatttatagactcgtttttcctatctatagtatctatataagaggaagtacctacctataccctaactgagatctagtggtatctaatctctgagattaaaatctatcgatctcttagggctgctaaaggtataatagtactaggtaaggacagtctacttacgttaatctagaaatatctctagaaatatctcggaaatattattataaggatttttatattatcgattgaactaggatattacctacagtaatagagaagtgcgcgaattatagtcttatagaagcctaggaaagtagactacttgttacctagagcttaccgcctaatctcgctacttaatatacttagtaagttattagaagcagtaatagcttagtggctatccttcttcgtagagtactatagtcttctaccggatacttagtttagaggatatctaggacgaataaccgagtaagccctcctaatacttactaatataatcgaccagatatgatatagatagaaggtcgtcttattaatagcctttaacctaaagggagcctttaatagggtaaataagataagcctagatatctacctctagtctaagggtatcctatcggtagcctagaagtagattgcgagctttataagtaggcgttaggtaagtattaggttcgacgactactagactaaggtagtatcgctagataaggctaggcttatataaggctctctactcttacttatcctctttacattctttaactatgacctagtcgactagccggttgattttcacagtagggtatctacctttatcgataactacttctactagcgagttagctagagcgctaaaaagaacctagctaaaatctagtctaaagatataccctagattgaagcctaggcctagcgaactaggtcctacttcgctatagagaagactgaactcatttatattacttataagaggaaagaatagagctagggctagcttattataaatagtaatactattaaactatctataaccgctaaactcctaggtataatctttaactataagctatagtagaaggaatatatataataagctgttaaacgagctactaaggttaatatcgcgcttaggggcttataataactctatctagagtaaatataatagctttacgaagcgtacattatactagttatcgactatatattaactatctagtataatctatttcgagataagacctatctacaatacctctatactatataataagtggcacttatctatatcctatctatatttcgaacggtagtaataactatacttaatatagagatatatatactactaatgtacctttatctacactactgtatatagaatactattactaaactatataccctaccttaaaaatatcctatatagaataccctaaattaagcctagagaagatataataatcatagatcgtttacctggttcctactattagaagccttaaaaaccataaacttagagagactataggaaatcgaaataattaatctaaccctactactaccttagcgaaaagaagccttcttagaaatcgagattaaatcagatagagagattgtaatagaaagggccgaggtagtatagttaaccgcagatattgtagtatatttagataccttaggaagagaaggctatctaggtaccgcagtagccgcgctaaataacttactagaaataatcgatagtatataagtataggttagacctatagattagtggttagtatataccgctaagctaattagggtcctatatgctattaatattattaataaggtcgctctctaatactagagaatatcctacttgcgggtaggatctactactatccttagtaatagtaagtcggccctataagtaatctagaatcttaggaataagttaggataatagattatctatactattctataagcagttaggaatactaagacctatagtatatcgatacgactatagtagatacccggatactacgaagtactagggaataacgctaccgatttactagctaaggaggcagctgtactaggcaaaacttacccgttttactatttactattatataagagagtatatattaggtaagggatctatgcccaatagaagaataaatagaacggctcgagtactagcgtatatctatatcagatcgacgatacactaccggctaaatatactagacggctctacggctctctacctagaaatcgagtatacttatttatacagttacgaaccggatactactagttattaatatatataaagactttctgatttcgagataacgatatatatatctatagtaaacgggaaagcgtttactatatattgttagattacctataattaagagaactgaggagagagctgtaaattaaggttagcgatacttttaatagtatatcgatactattaagtagactaggagaagaaggaagaggtaagattaacagtatattataaaccaagatagtggaggctgtcttggattttgctgaagtatcgtaacggtttcaaagccgcgcgctataagggcagtataaacacaacgatggtatagaggctacggtaggcctcggcaaggctctaagttcgcttaggaagtggtacacgatacatgtatataggaagatatatatagtagcggtaggctgcatatcgtttcgacgaggggtcagcgtaaatgaattacacacacatacacacacactgtaaattggcacttattctcttatctccctcaagtaaaccagcttactcacccccttggctcgagtggattcatgccttaggcaccaatgactttaacatgcttttggccgtttggtaggctgacgttcagaggtcctttagtactggtgaaagttctccggtcccctccgagggctcggaatggaggtgattcttacgagcaggttgaaatcatttcttgccagagacctggggggtgtgagggtattatgaaatgcacggatctgcgctttaggtggggaaggggctctcaactagccaatcttttcagtcctgctgactgcaatcacgtcgtatacctttgctcgccctctttaaaacgcctggtttattaaacgttcagtcaaaatttcaccgcccgctaatttccctcatgttagaagttacgttgaatgcttgttcctttaatggttttaccaaccaagctatagcaaattttcacatttaatatacaacagcggtcaagatgaccctatatatacagcccgtttattgtagtattcaagctaggagatttgccttgcttgggttcttgttgcagtaagtaacgcacccagtcagatttttgacagcgcctacagtgctggcgagtgaatcggggtgtagcgcaatccattatgcacaagtatctgtaactatcctgtctactattattaatcacgtcattcgcccagggctgaccagagccatgacaacaggagttccgttagcacgcttcagcccgtaacacgattggctctcggtggcaagtcagagtcccccccccccagttagttggcaattccggtggttgtaagctcttgcaggcagaacgctacgggtaattactaatgctaacagataagatgttggatcggaaaaacttctatccggggtttctttataatcctgtgcagcccttgaatggagtcgtccctctgcaataatcccacatttattgctatctatctcactgaaatggaattatcaatacgcccaatagcccatgtatgtttattcatagtttgttggataccatttactgacatgtctacgcaaagccacaaagtcgtgaccctcatggattttttccactagatggaaaggaccttaattccgtcacagatgaggctctggcaactcttctcacatcttctcctatcctccaccagctaggtggaacgacagttgtgcggctttcagagaccttgatcatgaagggtggcgggagtgtcatggctagtgaagcggaaatgcttcgtcttattgcttccagaaccaccattcgagccccaagagtctatcgctcatttcaggtcaaagatgatacacaatattttggtacatctgggtatattgtgatggattttatcccaggtcaaccactggatgagagctggaacagcctatcccgtgacacttaagggaaaatcgctgcgcaggttgctgaaataatccaagagatgcagtccattgagcttccacagcctggtcccactggtggaggaccatgtcggggtcggttcttcacagattatagtgcggggccttttatggacactgctgaaatggaagcttggtttaaccataagctagatatctgcaaaagtgtccatcaagccccaaaagacattccgccattccattttaccaagtttgtccttacacacaacgacatcagtcctcgaaacctgatcttagaccaacatgaacaagtgtggttgattgactgggcatattccggtgcatatcctcctgtctttgaaagcgcagcaatttcaatacagccatttttcactgatttcaatgaagcggtgttatccctcattctacgtcaccctgaggaggaaatgcaacttgattctattgcatatggattaaccaccgcggcattggcctaagggaggcttaaatggaagcggactacacccgtcacggcgaatcctattagaattagctggttggaggaaatttagttggacaacaatgacattaaaaatttgctcaatgctagaattcctcttagttgttcgcctcttaaggtcgcatatttaaaacacgtgcaattgctaattagtccacctaaaaaacaacagacttaaagtatctcattcgccccctttttccctcggggacaacaccacctagaagtggagataggagtcagggtcaatgatgtctagtttgttcccagaatagcgacactcaggccaagcaatgctggaagaacacagtactgaaattattgttagaatgaaaggcattggtcgtgaattgaacaggccatacgtgaaactatctcgggcatccgcatcaaagcaagcgaatatcatcaatgtattcaccgggacattgtggtaaccaaatgggcatagtagtgtatttccatcgccaaatgggacaataatgattcccgtgtggtacatacgcacagccgaatggcgggcaggaagatggaaagctgcttgctttagttcgtgagggatcctgaaacggcgcccagaaatgaagttgcttggaaactcatcagcagacccgatcgagccgcctacgagccgcctattcatttgtgggaaagatacaagaaaatatgtaacgaaaatctgcaacaagagatacaaatgaacggactaactaactcaagcatcaaaaataccgaaaatgaagtgaagaaaaaagaacgccgttcaacacgaaagttcctacatcccgtatgccatacccctgggagttacttgttagtccatcctcatgctcccgggattcctgctcaggaggccaagaaccgatattaagcgcatgtttttttttatcggttgaaatattttccggcggatggccccactgatcgccccaccggcacaaagcgcgtctgggaactatgctgtatgactcagaaacttatccgcatgctaagtgctttactaccatgcctaattttcacggtaaagagttcaataattcagctgtatgtaatgacagtttcttgtgggtggtgaagcctggctcaaattcaagagaagggagaccgcaaaataaaggactgtgggtaacaaagaaaagtgtgcaagatagtaaggaatggacctggtggcccgaaagaaaacaaacaagaaggaaaaatatcgggaaagtgggaaagagaaaaggtgaggctcattggtagtaagccccctggtcaaggggaagtggtgtctgatctggccacagcttgagaattcctgcttttgccgccgcaacctgggatgcgttaccgacaaactgaagttggtataaaagattaatctgattagtagtccagcatctgcacccaactcccattgcatcgaattcgtatttatgacgcccatatcgagtaaattccccccaaacttgccccactgacagtccaggggcaatatcgagaataaattgggcctgggcatcggtagatatttcgtaaggcaattctgagatgatgaggttggccttggagcctccccgaaggaccgagctcggaatagtgtagcttggctggcaatcgattcgaaccgagcttgcgggggatgacgaaaggtagaggcaccagtgattagtaccccctgccttccgatgtggaacggcgaggatgcgcttcactggtatagccaatatttgagcctggtgactggcaggcatatagtgaacgggctgaaaaccagacatagctaacgaggcaagactaaaaagacaagttagaatgaccaaactaacaatgaaacaataatacagaactcacaggatttgagagaaattgtacaatctgtacaaattagatcttgcgggcgagagaacacagatggattgtgaaggaagttgaggaaaacgcgtccttttaataaccatagattcgaaatagaggcccatgttaattgtctaaataaaactagtatacgtcgtttcatgagacgcccattgccttacccatcgaggcgggtaaattggggatgtgcacagcatttgattgacactcgactcttgaggcccgcaccacagtgagaccagaaaatgggcagcgtgacgcccgcgctacagcacttacagaggactgattttggtattacttattttagaatgcaccacagcggcggcacgagagcgggccatcggcgtcgcgcgtttttggtactagcggggacgagtcgtggtccagcgctctcaagataatattacttttctatcacacgagtcgcttcaggacatgaatttgtgttactgactttgataaacgacgaattaacagcggatcaacagcgagtcagagaccatgcctacgcgggttttatttgaggagcgcccccgcaccatttttgacatgaatatcatctgttttgactttccttgttgtatgattggaaaggtacaaggaatgcatggtgaccctgttgaagttgtgctttatgcaccaagagtttctattggatctcagccttggatctaaggaacgaaaagactaaatccaggcggacagcttaaaatgaatctcttgactctgggctttatctgtagcattttaaagatgttaaggatacttatgaggctgcgtggctacttccaatagggtggaaagaatgtatctatagagcaaatatactgaattcaacttcagattatgagagactgagaacatcatggtggggttaaattgtaggtcacgtgctccattttgttgtgcccaaccccgcctcgccaagagaagtgtaagattcgtttcgattatctcgacccaaaaaaccgcagtcgagcaatacgttgtatgcgcattcagtagcggtactagtggctgttctatgaatggacccatggcctacctccgaccggctgcgaaaaagcctaaacaggatccttgcgacaaattgaggaactggctgccataggcagaatttccagcgaaggacgatgcgcctcacatgaggctatatcgaaacgttccggtggattttcttcggcctttccaaaaggaggtatggaacttgtattactaattcccttaatattatatgcagctaaccttggccagaaaatgaaaaccagtttgatataatttgcgaacggagcctccccgcgggaaccctacagtactcttacagctatcctcctacacgaagataatgcaaatatatctcttatcaatcataacgcaaatattctactagcgagcggtgactcgatagaatggagtggattaatagaaattctgaattcgtgtatctatatagtgacctagagtaaagagactatctaacagcctcctccgtgagatttagccactgtttaggtaagggaatgcctattattagagaaaaggatagtatacaatagttaaatagagtagatagaagcgctaccgtttcttaagaagcgaaatacagtaaaacaggtatctcagatatggtattaaaggatagaagggaataagaaaatatttctatatttacaaaatccggaggacctattaaatatagatagcgtaaatctatatatttttagttattaagatattggctaagttaacgaccaacgacttacgtgagtcatctggttagatttaggaaagcgagtatactgtctaatacccctggactaaatattacggatctgaactagtaagaagaagtcgcttatctagtgctacctactataggaaacctttagggcttagattcctacttaaggaagccctctcctagtctatgggaatcagtattatattaatagatcttatttcctaggaggcttactggatagatttagaagggaataattagggtcttcgttaaaggttatctgcacttatatattaaccgataaagttaaattgaaagataggctacttatatttaaatcggtcccgctgctaagacaatgtcttttctgtgcttcgtataagaagcctgctgccggctgtaagtaccttttagtttagggttcggccctagggtcggcttcgctattaggggaaatctaatctataggaaagaagagcttttatctttccagcttatctatgatatctgaaccaaatggccctaggtactattttgcaaatgattctagagcgatatcgaaattgcagtgtagagtattatatatatctaagaatctagaagctaattataagtaaaagcgataagcgaaatggtttatatatatactgaacacttttactaaatatatatttaataatatacagaatagagagatggtttaagtgtaaacttgcttagtttttcttatattaatcttcttttaaagaggtaataaatatagatttcgatttagttactttcgcccagtaccttaataaagtaaaggtcggggtaactagattcacccgttagctctatataaaactaattagcaaagaaacctaatagtaaaataagatatcaccgcttctaatatcccaaccgctctctatttataggcagttaattgcctctaccccctaagccgctctataccgaagctcctgaaggtaatcgggtcctcctttcgaaataaatcccattatcttattcactgattttggattaatactaaggcaatatataatatggcagagtgtacctaataagaaattctaataggatacaattaatttcgcctacttcacattatccgcacattttttcgcgaacgaagtataagcctcaatggttcggatgatatccgaattccgataatagatagctgatatcgaggaatcactgtctctaaggtaattttcgctttggaataatatatctaaaacggaaactcgttagggacatactacactaggccacttttctgcagaaggaatcctattgataaaagttcgaagaggctttctctacgtttcttctaactgaggagaacctgatagagaaggccttatataccgagtcactggacggttttaaggtataggggatcggagaagatgagataaggtgatttcgagtggaatctgagatcgcacaaggacatgctgtggaacataaggtatccattctctcagtatatgctgaagatgatgaatgtgtctctctaatacagcgacgtggtaggaagcgttactagattctatctcatggacgaagtcagtcatctaaggatgacagtacgatatagaatagatggatcagcctctagagagatggcgggggaagagagccatcaccaaaattattagcaaagattaattggccgtgataggggtatgggctctcagcccatacccctgtcacagccaatcaattgcggggcagtatctgcccaggacatgagcttacatgcaagctagttcgttttccctcaccaatttgtcctctggccattatagtgacccatgtcagtgaagcccgcgtatgcaaggctagcgaaaatggattcggtacacataaatggagtgacactagtgcatttattaagccgatgcatgaccgcagtactaatctgtcgtgagtagcttacatacacataccaatggcatgaaattagattccgggaccttagagtggcgatagtatggtctgcttgagcctactttcgagcttcgtatcgcgcctctccacccccccccccccccccccccccccccccccacacccgacaacccgcgcccnnnnnnnnnnnnnnnnnnnnnnnnnnnnnnnnnnnnnnnnnnnnnnnnnnnnnnnnnnnnnnnnnnnnnnnnnnnnnnnnnnnnnnnnnnnnnnnnnnnnnnnnnnnnnnnnnnnnnnnnnnnnnnnnnnnnnnnnnnnnnnnnnnnnnnnnnnnnnnnnnnnnnnnnnnnnnngagcttcgctaccccccccccccccccccccccccccccggcagcacatgtgagacagttttatctggaggcccagattcgaatggaaagtttatgcatgaaactacgagcgacgctatgcctataatgttgaaagaatagcctacctctaccttctctgttgattcggactctggtgtctctgccgaagactctgcgccgattcgcttgcgcgtgggttaccctttcttcctcgttgacaccgagttctaaccaaacaaaactgtgcgacgttggttttttcccaaggctcctgaacttatggatgccattgcccttcaagagcttggcgctcagtgaggtgttgaaatggacaaacgttggacggtctggtatgatgcctatcttggagaaattggcagccgccttacaaagctcgcttactgttgatcaaagcaaatataatataatttatggcttgctcttgtactgatcatcggaaaggcctcaatctaagataaataaaaaggtaaagtttgaaggagccgtttcacacaaaatgcttcggtatcgatcttgaagtattccccacacttgactattatggggcggtctcaagaaaatacgcaagccctgtgatgcttcagaagatgaagcgtcaaaatgccaagtcaacagtgccagcatcaggacagcaccataactaagatgttgtaaaatatccctcacgtaaacgcgtaagtcattctcgagagaaaatccttcgtcggatcttctacttctcaaatccgtgcaaatatctagcagcatcctagcatctgggctgggattttttgaggacgtagacgtccattcccagactgacggagattcaattctcaaagagagtattgctttcaaagcaatttctgctggcccatacaggaattggacaggaatcggggtggacttctagtgttagcatatcatcgtcaccagcgaaatatgtgggtactaaccatgacgaattatttggttcaatgacaaggtgcgatcaatggtgccttagacagtagaaataggcacctttataacctgctagacttgaaacaataaacatagctgatacttgagaccttccatctctattgatgatttcacctcatattattctacaccattcgatgcctgctgttcaactgaactcatgcactgcctttcttctgcatcattctggtctctttttccgaattggatacgatccctccgcgtatcagagggagagcaaagcagagagcacctagatcaaactgtccccattgcttctagcccgtatacgcgaaccgagccagctgtatatgagcctcaaaacaccgaatttgcacataacgccacaaagcctctacccatatgcatttcaaatcgaatagagagagcagcatggactccactttgtgagtttccctgcaaagtgcgagccttttatactgtcttcttacatttcaatttccagcaaaccgaccccgagccatctccatgaaacctgatgacaacacagatggtgaaattattaagcttcctgacgttgtatttgtcaaaggcaatgtttatttacgcgaaataggaacactattccaagatggagaagggagtaacaggtgcccaatgacataatgaggacccagcgtagaaagtaatgaatagcaaaatacgtctgctttgatacacctatataacctttatgattccctctcgttactagtagcatgacgacagcatcaagctttttacaccttggcctcatctttcagaaagcatttggaatcatggcaaggtcgacgccacatataatcaaagccatgttccgtttcatgctccttgcacaattccgttcttcacaattctggtcttcggctctcaaagctatactccgtttcatgctcctcgcgcaatttcaatcttcagctgtcatatcctttgccaaactcctacactattttcaggataaatgggggaatcttacaatttggattctgtatctgttcacgtactcgatttcaataagttcatttgacgagttgcatccgtccttgatgagattgatttcgcgccaccatatgttggcaaacgcacaacattccattgcaagaacaaagtcgaaatggtcaatatgggtagaggatgatgccgactcagaggatgacgctgaaactcttgattctcagttcaagagaaacgaaaacctctactggaagagacagaagcgaaaaggcctgcgaaaaattaaattcgagccaacccgaggaaatgtcgtcaccttctattacaaagggtacctaataggtcttcgtcgtgaggcaaagcctgggaccaccattattacagaagagtccgaggtcatctggctatactcgacagaccggagcattcttcaaagcctgcttagtgatgttcgtgacttacaaacattgaaagaccactgggtacaatattttcgtggcgaaacagcgaaagacgtttcctgctggtatcctatcgccaaagaacctcctcgatctccctccactctgatactggaaggagaagttctggcacatattgtgtccgatattaaaaactacctcgatccatcaaccgaaagattttataaaagaatcggcaaacctcaccgccgtggtttccttttatatggtcctcccggaacaggcaaatcaagtctatgtgcagttttggccggaaggttctatatgaacatttacacattgagtctgaacagttccaatctcacggaaagtggtctagtgaagctctttagggatctccctgatcacgcgatgatcgttctcgaggatatcgaccgggcctggggttctgtagagcaattcaaaacagacattccatcagggacggagtcacatgcacgtaccggtatctctctctctgccctcttgaacgtgatcgacgggaacggtgcaaaggaaaagcgtgttctctttatgactaccaaccatctggaaaatttggattctgctctgatacgacccggtcgaattgaccgtaccttttaccttggttacgcaacagcaatgatgatcaaaaaattattcatattattctatgagccattcggggttgacaaggatgaactttcagaattggcaagcaggttcgccagtgaggtcccaagcgagatcttcacggcagctgcaatccaaaactttttactgaatcataaagatgccccggagagggctgtttctagtgcagccgattgggtgaattctcgctcaaaggaatcttaggttcactaacgagccgtttcagagcgtctgtcgcactgtacggcgtttgcgggttggaatatcgctttccccatgctaagagagctgaaaaggggtgggggagagagatggaagaggggtggtggaaaatcactgcggctacagcgcatccgactgccatgtcaaggatcactagtcacatgagcagcttctacaggcaattttatgtgaaagatgtattttccgggttttcagcctacatgaaaagattacgaacctaggaaaagatctatactcgcacaacgactttagatctttacagacaagttactcatttccccaccatgaagcaagcaagtctcggtgaggctcatataaattccagggcaatatccattcatcctagcgctctttcccaaaaatcttcttaaaagtttccgtgtccaaatcgccattgaacagggtgctgttattcttcacagacccaccattgatcatgtggagctgggttttatcgggatgcttgtctctagcgttgccgttgaatacaactgatcctttatctatttccatcccaaataagacatgtgcggaccgccttgaagaagcatctatggggagggggaatttatattagatttttctcaagtgagggcagcaaggagtgagacaacatcgcaatacctcgacttttttcctcctcgcctagaggaacgagatctgaggattgtttctatgatcagacaagtggttagctagaacatggtattttcttggtcacaactcaccttgttttccgaagacagggccatatcctccttacggtgctgagaagtgactggagggccacttctagaattttcttcattcttgtttggatccatatcaacaatgagaatgaaacggccgaagaggatgaaagtacttgttgagtgaatgtattgtagagtggactgtcatatttatatcctagggtctcgctatgagatcaatcgaactagtctcaaaatgaatgagactgaaaggactagccagtctttctgccaggcgttacaaaaacaagcctagtcaatcaaaaatggtatttaataaaatcttctgcccttaagattcctgcggtcacggaaagggttcttgtttacgactcatcccctcaccctgcgatttgaaaaaggtaaagacatgctaataggctcttgagtctcgtaatagaacgattccggtcaccgaaatcgtagtatgcgtattctcgttggtggctggctaagatggacatggttttacttgccattacgttgttcggataatgccaaggccggcatgtgccaccttcaattgatacttcggtcttttggtagaaccaccgagtctgacgatactgcaagatgggtgccactctttcacggctcaccctctgctcacctcctctgatcgtgggattcattgtgtttgtaaagtcgaaatagatgggatagaaggatttacacaacattttgcaagtgacaagaagaaccacacagacatagcatgagctggagaactggggatatcaaattgtggttagcgtatctcttactctcgctgagagtgccactagaccaaaataggcagcacagtgtctgttgcttatggcggattttgtttaatcctttttccttttctcatgcttttgctttttttttgcctggagatagaatcttctgttctgctttattgctacaatatgtacctgacagcggctcgtctcttgtcttgactccgaaatcttcttatttaaggcggtcgccagcagatgccactatcagacctagagatcgtactataagaccggatagtaggggaaagtaccccgaagtggagaataaaaatagtgtgtccacagtaattattatagtactcactcagatggtctctagggagccaacaccaacaggctttccgaggcctaagagctcagactagtacagaataggtagaggctgatcggggtttccctgtcaatgcatatactagcgctgatcattgtatggaggtgggaggtggcttgctacaatttcggtatcctgggatattgtgaaatgaggtggctgttgattgatagaccacatgcctcccttgtcaccctttccagatgcaagtttgggcatgcaagcccagactagacactcccattctgctagggatcagactgtatgtgagatttttcagctccacatgaaagtgaattaggattatttctgttagaaaataaagcgcgtcagacgaacgagtcaaggtctagggtttatgtacctatgtcaatcaaatcacaggctagaagcgacacgcgtggcaatatataagtgtcataacctcttcagatccaggtttttttaccatactcagctatgtcggctgcaataatcaacgccggtaccccttttagagtaccactctagtcccgagccgatcaatgcagccagtgttgatattcctctctatcgtctgaaagaactgtttcccgacattcaacgcttcacagctatggctgtcgtgttttcctaccaccctgataacccattggcaccaagagttttattaatcaaacgaaacggcaaggaaagctcatggggtaatacctggcagccagggggaggaactccagacgagaaggacccgactatcatccattccgctgcccgagaaagcggggaggagacgcagatttggccttcgagaattgctggcaatgcttttacgtgttctttctatcacagagatagaaagaccagcgacatagtcatcatgcgcacgctcggattcatcatcgtcggcaacgaagagacgatggcgcaacgagtctggtccagcgagatgcaagagccggtcggccaaagttccgtcgagattagcgacgagcatctcgatcattgctggttcaccgaggaagaagttcgcagcgctgctctatatgagcaagccactccacagggtccattcgctatgctcctggccaaaatggacatggttttacttgcctttgagttgttcagacgcgagaattgcccgccttcaatagatatagcgccctatggcgtaaggggaacttggaaaatgattgagctccttaggagccctcaaatgatggccacacgaaaatccagcgggttaattggagcggtcacttaccactagcaactttcccatgcgccattttgggctatttgagaatctagtgttgttactaccgattctgcatatacaaacatatttcattaccattgacaattattctatttaatgcacagatagaaaaaaataagaaaaggatcagaaacttcgatactttgtatatcctcgctttgcgcaagctggcgactggtgcaagagatattgttctttttgaggagcagcgcgagcaatgtcctcgaatgattttattgcccgaaaagcaacaaccgcgactctccacatgagatgcgcttttccttcaccccgtccatcaatgagctcccactgaagacgaacattagagtcacccccaggagatgataccttcatgaaatttaataccccggtcatcgtggagtaatcaccaagtgctttccaggaaatggtggctcaagcttccctgccctttttgtccaaacgacaggatagtaatccaccacggcacgccaagggtcttcgggaaaggtgatgctggttttgctagaaattgactgcaattttgctttatccttcaagatgacttagtagtactcacattctcatccggggcactaaggcatacttcgagtaagcattccacgacaggtcgcacgtcctctttgcttcttggtgagacgaagagccaggggtatcgatcatgagatgtccgcgttatctgtgatctgactttagcagctgcaacagcagctgcgttctctaatagcgatttatacggcataagagaaaatccgaaggtgatggttggcgtaatttaagattcttctaaaaactgcacagtccgtctgaaaattggttgtagaatattcaggttgaaagcacgatttgaacagaaagtgggcgaatggctgaggggcggaggggcgatggcggggattgaaggtcggacagtcatacggtagtgcagtcacgcggttgtggtcccgagaggtttgcatggtttgcatactcttagtgcctaaggcaacaaggacttcgctttagcatatgcgcgatatgcacctgggcatgcaagctagtcttggcaagacacacccggggaattaatttcagtaagtcttcttttcctggtctctataaatagttaaaccgcgcaggggacaatatggacaatgtggctgtcaaattaccagagatagtgacggctatgcatttgaaccatataggatgcgtccatacacgagtagtccagatcggcgtcctagtagggcatcatattgaaatatatactttagcaagtactaacctattattaaccaacaaagtaccaggacccttaagcattcacgtaggtaacgccacgccaaaatgacttagcagaagagggaacttagggttcgcgaatgggttagaaagttagtatgcaatttgcagggttggccttccattcatttaggttcgcgagagcctcctcagtgaccgctttagtactaaaaggtcgccacgccttaagtataatagattctgtggcgggggattccccccacttttggacgtcttatagtaagaacttctcggaaaacttgcctatgattagcaaatagaccacggccttattaagggcaggataagattttgcggtaggagggttcctatatagggcgtatacaatcatagtatctagtgggaagcgggaattgtttctatatacctgtcagttaaggggggataatactatactaaaagaattcttacatttttttgcctacttctttactataccgaataagaaagctggggccgaagtagtatatacactactactaatacttaccgattttctttttattatagaaagatttataaagttttcttttctcaactggtatcaggcctctcgagttacaaagtgtactgataacatttctttttagagcagtctctactataccccattgacgtttatactcaatttctctaataaaaaacagaaatagagaatatcgagtaatacgtagctttatatcatatatattattcttattatataggcgtattaaataggttataagactggtacaattaggcttttaagcggtattcgaggagcttaagttattctaggaagggccgctctagaaactagagaccttctaggtataggagtattattctaaaaaggcagtaaggttatatgaataaaggtgtttaccggtacactagacttccgttagctattataaagtcagttaggaatataccgattctagaatattaggttcattcggttcacaatcttcaactactatacttggttactccggctcctctggttactccggctcctctagttgctccggctcctccggttacttaggctcctccggttgcttaggctcctctaattacttaagggtaaggtagggcctaaggttcctagaggattggtctgattgagatttaatagtaagggaaagcttccgcttagagcttgcctaaaaacccctaattgataagggtaagtgagatatatctaaaagcttcttaggccatgcagacaggctattattattaagcggagagatagatctagaaatgcgaccttagggatttgaggttaagtcgaccgaattcttatctttacttaaaaaccttatagaatcactaataaccaagttaatatctaattccctaaagctttcacttaaaattgaataattattagggttactaccccttatattactaggagtatagtcggctcgttactatagttctaataagtatcgtttaaataagtattatttacttgaggtaatatcattagagctaattaaattaatagtagcaatttcgtctttatcaggagtatctttaactatcggctagggtctcgataaggattatcggaagcgtttaggtattatacctctcgatttaatttcctctagtattacttttattaacctctctaatcgcccaatcgttagactcgttaggctaaccgaacgaatatatatctcgttctttgtatattaggtacctaaggtttttaaagatctaggctaagtcgatatatattagtggttattatctaaatcgatagtagaattgtaagaagttatatctaagttgtttagtaagtttatatttaggctatctaggagatacttatcgaaattattaggaaaagattaattataggtattaatagatatatctagaaaataaaggtaaattaagtcaaatcctcgagaagttgtgtttctaggcttctttactagataagttttagttattcggtaggactaccctatctaataatactataagatagccttaatttaggctactatctatagctgataaagaaaattgtctagagctattatactttaccttataatcgaataaacagtctgtattagcttaaatttacttataaaggctaataaccgttttaataggtaatatcgactaaagtttataaaagatatagactatatttagaatctataatagggttaataagcgttaggtcctaagtagagttaggcctacctctttctctaaattttctctaggtaagaagttaaagctcccttattctctatagtgattagcctaaaggaagagtcagatagtataagttctgattaggtagctagcttatattaagagaaaacttgatctaaagtattttaagggtaaaagcttctaaagaggactaaggaattcgatagtaaataataaatagatttcgagagtacttagagatcgctaatatactttaggggaagaggggagcaatactaactataaggataatgtaggtactactctttcttagcttaccttcggcttactctctacttactctctgcttaccctctacttacctcctctaatcgcgggatttattatatttataaagtcgaatcatatgggatagaagggtttgcgtaacattttataagtagctgagggtataaaaggaactttataataatctaacgaattcaacctctatagttaaagtgaatgactatattctttagtcttattgtaagttattaaagaaaggaaaaacgatctttataaagtaattatataggattagttaaagctgttattatataactagtattatagactaataataaacgttaatttatagtataattatagggcgattagagcacttagtaagcgcttagtaagtacttaggaagtaaggcagaaattattcctcccagcagaaaatgtaaatataccctaggacctagttattagacctagtataagttatatagtgctatttagtaggcttagcgggtcttatcacattatttcctaaaatggttacgtatatttaacaaatgtacaattaaggcttacttaatacattatgatttaggatcgcttaataagcgacctttaactgctatcacaaccaggaaccactaggtttctactccctactcgttatatataggcaactgtcgagtgagataagagcttttgcttgctttccctgcgccacctcttgttatattaaagtaaggaaatggataccctttaagaaatattattataaaaattggatggattagttgatcctagacgtgtgttaaccattacatacaatcaactcgataagcgttaagtaactaggaagtcaatagttcttaagggcagtgttagttcttacggtcctttccctttatacgtatgtcgaacgtgaagggagttactagctaagtgttttacttattcgaggaaatcatattgcttaattaatcaattaaattgattaccggcgcatagaatggctaaaatgattgattcgtttatatatatttaaagcaaacttagccgatgatgaattcttttgcccggctgcttaagatcacgtatatgcacaatatgaaggtttgctggtgctcaaggtatgctgtagtgacgttacagtcacgtaaaaggtatggcgggcaatatgtcaataacgttgaaagtacggttgctttcacgttgccgtacctatttgatgaccgcaaataccaccggtcattgcccttctagtcttgcggggcccgcattgtgagtttaatacataaaggaccaattttcgtggtcttttcgtgttctatgattggttactccccttcgtgcaataacattcatatttattgagccctttcctattagcagacctaagttttgtaagagtccctgctatctattttttctatatagatttctcttctcccaactacccccagatatcaaggcaatccgctcaatggccgctattaaggccaccaggtccaagcatgtcacttcgaaaataaaattgatacggcaaaaacaatgccgtcgcaaaacaagtctgatgaaaaaggcatgcgaatatagtaggatgtgcagcgcagatgtgtgcgtaggtattcgcatgcgggagaccggtcaggtgcatatcttgtcggcggatgcttcgggcttttgggcttttcttacttcgcaattggtatgtaaactacatggcatcatctaccaggcggagcgctgacttaacagagctctcattacccaactccgactgtgatgacagatcgtgatttggagaaaaccagggaggagacagtttttagggagcaacgataggaaaaaaaaaacgcaactgctgtacactagagtatgcaagttatttctatccttattgcagtatgtttttgcccataaacatttttgtgaaaaacagtttttgcttttcctttcactctcttacttgctatgtcaagaagtatatcagaggctgtgctaagccaaatatcacagtagtctacaatatcattgtgagtttcatgaataaagcaggaagaggctcgaagcttgaccgggaagagccgccaaattgggggagggaaaggaagatgagccgccctgcaatagaccatatcatgagagatatacacattagagtaacaacggtcccaagcagcgatatgggtgcctgagaaataaacgtggtaacgctgagcgagttgttgcttccggcataaatattagtcatcctgctggtgaggattactatccctgggagtataaagcaccgtggtttccttgcaatagttgaaaaatatgtgatacccaagtcctgactgacaatggaaatcacgatcttttacgccattgcagtggggtgcttactgacaacgctctttctcattcgcatagccccctcctttctgaatctactcggaattttgtcgttcctcattacgaaacacttaacatatccatacttgtggggtcgctataggctgattgctccttgcactcgagcagatgccttattatatctcgcgtacgctgtaacaaatgtttttcttgttgccttcaagactccgtcaacaacaatggcaagagaccgagccggaaccctttcagtgatcaacatgagtttcctgttcttggcacatcatctaggattccttgcaaacgccatgggtgtttctttgatggcgtgcaagcgcatccatcgggctgtgggttggatgactggcattcttcttggtttacatatcatcatggcaatgataactgatcggaagagctggatacttcgcgagaagcctaacctctttgtattaattgtttgtcatcgctctcgcttaacctaccctgttagattagtagcgctaattcttcttagggctctgtgattatggctgcaattctattgttatccttccctttcgttcgccgtttcctttatgagccattccttcgactgcactaagccctggctatagcttgcatatattctgtatggcggtatctgccatccggtactctgctgccccggctgtatgtttacattccgcttggcataatgctacttgtattgctggtcgaacttttccttttcattattaggaacggtgtcttccccctatgtccctattcttgtgcctctattagatgtgatcgggtgtaacaaatactaatacagagcaaagaggtaataccactgaaagtaaggagcccaacctcttcgcattaattgtttgtcatcgctctcactcaacctaccctgtcagatttagtagcgctaatccttttcagggctctgtgattatagccgcgattttattgtcatccttccctttcattcgccgtttcctttacgagccattccttcgactgcaccaagccctggccacagcttgcatatattctatatggcggcatctaccatccggtgctctgctgccccggctgtatgtttacattccgcttggcataatgctacttgcgttgctggtcgaacttttccttttcatcgttaggaacggtgtcttccccccacgtccctattctcgtgcctctatcagatgtgaccgggtgcaacaaacaccgatacagagcaaagaggcaacaccgctgaaagtaaggattgcactcacaaggcccctacatatccaggcaggccaatacataagtctctggatacccgcggcaagcctattctcctgggcccagacacacccgttcatggtgacatcttggtcgccagaaaagcaggatgtcctggagctttttgttcaacctcgaagagggctcactgagactattcaccatcgtacagcactggatggctatacttccttaacagcatttgttggcgggccgtatggagtcagcaaatccgtagaccattacgaatgcgtcttggcaattgcgaccgatttcggtatagcaggtgtcatatcttaccttaaaaagctcctatacgggtacaacacttgcacgtcacatgtgcgccgggtacatttcgtgtgggagatccaaacattgggtaagttcggcccccgcgttcaaagagcaaaccaacgatgctgaatttctcagatattgctgttgcagcccaaccacttctaaacagcttgttaagcgatgatatcttggatgatggctatgtgggttggctgttcatgtttaaccatactcgcgctaataacgtgatacagatactcgaaatgtctttttttgtggcatcaaaccagatgatagaacatggcaagccgtttggccagcatcgccgcgcgacagttttcaatggaaagcctcggtatgatgaaattatatcagaagaggcttccgggcgaaacataaaacggctgccaaacactcatgaagaccgcggtgaggttctggttatgggtaagtccatcaccttgaataacaaaccagacgctaacttcctagtatccgcatcgcatgaagtacgagatcgtttgagagaattagttcgtaaacacctcgaacagagagtaaggttacatgagacggagtttcaaccttcataacgagaagggactaatctgtcaagtggggggagatggggcgggtggggccagcgaatgaccaattggccacagattaaatagaattcaccgccctccagaaacaagtttaaccattgcacccgatctgttcttcaccgtcaccgtaaaccgattcatcagtgtattcccccagtccaaggaacagcgtatgctctatgattctgtgatcagttcttgtttattccaatcacggcataatttaggatttgtaaacagggtgtactccattccctgatcggcttctgtttcaattctcacagtttcttagaaagcgattccgttctgactatgaccttgctgttgcgttgacgaggattttcataagggcatggcgaccggcaaaatctacttcaacgatcccatttttttttttggcgggttgggaaaactgtggccatgagagaaaaatcgtggtcaaataattcgatttattgccgtttaggttgcgacacctttttagggtcgcaaccaaaacggctcccagttgtcacctttcaggatgcgcctttgggagacgcttgaaacccctgtgtgccattgtttattttattttctaaccattcgctttcttcctccaaattcagtgtctgttcctctttacactttgcttgacagaacacgaggcaattcttctactatccagacgttcccccttgaagcccaccgttacgagaagttgaccatcaatttcttagtgtcgctgaccagcacacgaataatggtatcatttgacccagacactttagtctctcatggtgcccctggacccgatatttctgatgatgaccttgttgattgggatacctggctcacaccagaggcactccacaatgaaaaatatctggctacctcacaatgcagctttatcaacatgggaagctgtactgagcgtcagcatttactgaaacatgctcctcagcttcattcaaaccagccagaagtccctctgccatcagatgggagtttacagttgacgcagtccacagacggcaacaaagagacaatgacaataggtctccaaacgtcgagtgcaggcgtatatgcctttgcgaaatgtggaaacacagaaatccaacccatcgtgatcaacgaaaaagaacaactcaagtattcaaagcccagtgaagacaattacagtctgttcggccttgggaatcaccaccagagaagagccctcatttcaccagatctcaagcttctgaaagtacaagagatcgaaagggaaacctttcacaaatacaagccagtcgataaccggacccaggcagctgagtacgttgactgcattcaaagaatatgtcagattgcaactggcgagactatgagcgtaaaacaagcccgagacgtcgaagactgcggtgatagcttgatcacaattatacgatccgacggcccgattgcctcgtttaagtctcttttacttaactgtcacttgtataccttacctcgtgttgacttgaattcgtccctagcggcatgcgtgtcatatctgaggtacttgaactcgctcacttcttcaatttcgaagtcagacgatatgaatcgccgtcttgcccagatttggatccatattcatttcgaaaatcatgtcaatgatttaaaggaaagtgagaaaaacggtcttccgcttaaccgacaacgtcgggcaatccctacgatcgctagagattctatcttacaggcttttcatgggaaccaattcgtgccccaaaaaacagatcgcgactatttgagtgatcaatgccgctggggcgagcgttggtggaaagctgctacttgcatgggacttggtgtgatcttactagccagtgaagacttggcaaatcaaatgtatgctcatttatgccctatggaatggttttattgctgactttgaatagaggtagaagaacagcttttcagaacaaaatggtagacacgttggccatttatgttctcaatcgctacccagctctaaccagtctttatcgatcgtttgagtctatggcagtagacctcatgcttggaggtgatatcgtctcttcccaggaccagctaaacctcatccaagaggcgcccgtggagaatgaagcaaattcatgcaagctagaaagatgggtggttcccaacctcaactctctgtctagaattgcttcttcccacctgatctttctccagggattctaaggccatagttatttctagcaggtgttgagtcaaacatattatctcataatgccatcgtctctcttgctcttagaccgtagggaaccgtgtcccagagggaggggccttttccaagtcgcaattgctgactcagatttagctccaaatgaccccctaagctgaggttattggatcatatcctacaaccaatccttgtcttctcgatacgcgcgctggctggtggttgcggatggcaccaccttctcggtccctgtcctttaaattcttcaataaattcgtgataaagatcgtggtctattagaggatttcggccacaatgagtcaatcacgcagcatgtatgaagtctcttatgcggcagccacgtctcattttaggaatggcgcctcatacccatctcaatttctcagacgacattccgagcccacgatctccttcactcgtaactggtaattattggttttgtaccgtgattttctgaatagttaggacctagccgccatttaaggacctactagggaaaaatagcatttctaggttcttagtttcttcagtactcaaaattagagctctttgctgaagtacacgagctaatagattacattgtctggatgcacgcttgatgcatttactgacaacctttccgacatgattgaaagttacgggtatatgatggaacctttgaaaaccatgagcaagccaatactcacaattccttgaaagatatcgtttcctactatctctcgtaggaatagaacatccttgcagagactaaaacagaccgagcaagaagcatcaactctcctaccaatcggctttctttgcggacaagcggttgctgataaatgttagttttatattcgtctactcatgacatgttggcttgggtacctctttcaaagattcaatagactttgctgtcgagagggcggaaaggaacccaaaggcatctgagtcgacaggccaacgatccacgtcatctactcccaccattccatcatctttcacatacttctgcatgatttccatggtaatgcaagcgagagttttgatgtatacattctgtgcctgacccgggggacgttctacgcacatctccaagctggctataggggattagaataatcattatgaaggacgcaattgccacttaccgatcttgataacgccatctaggccgagaaggatattccggcatatcagagactggtgttctaatccagtttcattgaggtaacataaaccattcaaaatctgcactgtcgtgagcttaaaatacttgaagtgtcaagagccacatacctgccaagtcatagaagctaattccgcctccgtaggatagagagaccgacaccccacaagctgctccaaagtgagctggaggtcgttgacgagagcgtacatgcatccttcattaacgaagcactctcgggccgtcaatacattatcgtggtcaaggatatcatacagtcgtcgcattttagccacgtcccctttggtgtactcccgaatggctactacctgggacggatgggaacggcgagctgcaatgaacacctcacctgccagattacacctgagggtccgacgataggtgtcccagggtgattcctccctcacgattaacccgagatatgtaccttcctcgcacacctgaggtaagccaaagcattttgggcctccactcacaacctttcgtgtatgttcgctccggggagacatttttctcttttttgagttggaactactgtccaattgggtgggtgcatcaagctggtgtggctgtttgctcaagggtgcctctcgtggtgggttattcgcaagtcgttcttggtagctcttgaagtcaatcgccgtgcagtgcttgtcttgtttcgacatatttggaccagatcaagaggtgcggaaaggaaatgaggtggaaacgtatagtgcttgaaggcgaaggcctatttataatgcaattgtattaatggaactaaatctgttttgggggccacccccagcttttgcagtcacattggtcaccaggacgctgaatcagctaggtggaccctttcttctgtgaggccaagaccagtcaaatataaacaaccgatactctactgctacgtagattctgcctcaccagcacaatggacgagtctatatacacagatcctgagctgcagatcctgacagaaaggtgtcggacttaccaaggaacagccaaggttaacatcagccagattaccccccacccatccatctcgcaacatatgaacacaaaaaatgtggaaagactctgtgagatatttgacaaagaaggttgtcgaagactcgatatatacaaccacgtgagcgctgttgtgtcaagagagcatctccatgaggctcttcaagcagggcgagtaaacgccgctgacatgatgactgatcaaccgagccgctacccacacctccatttctccactggttccatacagtgccttcatggtcaacatcgattaaaggccggagaacactatttaccatcgatcgaccaatggtggactgttgacttgtatttggatggtaagccagaaatccaccacatgctttcccgcagttttgacaaccccaagacattagtcccgatcttcaaacaagccttgtcgatgaatattccaacgagagagttccaagcgatggtgagatttacctgaaagttcggcaatatcgatatgaagcaaattcacacttcgaaaatcgatggttggcgcggctgtcagacaacaaagccaggcggcttcgcggacttgagtctcatccgagcgtccgagctgcttttgactcgttactcggcttgccctccttgatgatacatggaatgcaaatcggatctcttccgcaggctctggctatttgctgcgacgaggtaaggtcgtctgactcttaaaaaaacatagatgctgattacgttcgtaggagatagttcacgcgctgactaggctacggcaatactggtcttcactcgtgggacacgatcgtgctaagatgctcaaagttgaccctcatacggtggaaacattgcaactcctggcacctggagtctcctcgaaggatagaaccaccgtgaaaggtcttgtacacagtggcgaagtcttttcaaatttcacagcatccgagcggacctcaatttggaagcgattaaagaggacagagggcataattccatctctgtatacgtttttcaaggatctctggtacctagaatcatgcgcgaactgcatcaaacggcttatcataccttccagatcattccccacgattagaggcgccacgcgtgcggccttcttgtcttttgattccacccatacgcagttcttgatacaaacatccgaagctgggtttcgatcttactcgcactcccagggggacccagcggaacttggatatcgacaactatggctctatgctatgcgtcactacccgaagttatccaaaaagcctcagaagaaaaatcctacggcgaagcctaattgtgaggtggtggagcctatgatactgtatgagatggctgtactcgcaaagagacttgggtttcagtcgccacaaattgagcagctcatccagcagtcgcccgatcggcaaattgcgcaagatgctcttttgagagcccgtcgaccagatcgttatcggtacaatagggaagaaattgaatctctgatcaacaaagtcaccgagtgcttcttgagggccgtccttcttgaccataagcttccagtacaattcgttggtggaagggaatccaagaaggaatctcgatgtggacatccgcaaaccgaagcccaactgcaagattgtcaattccttttcatcgaccaactccatggtgattccctccaaagggaacgaaaagctacttccactttggtgaggagcagtgtctactttaccttcttcagcaagctgtcaatgccctgtgaaaataacgacacagcgggtatatctccaactccagacttgccaatgtccccgctttttattccgagcaatagttcgccgcaagatgaaggagaacgggttgggtctgcgggtacaggagccgggcaggatagcaacttagagcggcaacgtttgaaagatgcacgccgagggagacgtcagcagaagcaagcgaagaagctacagaggcaacagcaacgacagcagcgaagacaccgatcctcacgtgcgggccgtcattatggcaaggaaatcgcgcgcattgattcggaaggcagccggataggagaggtagtggagccagcatccgagacaggatttggattcgttggaagtaggggtataataagtcaaaatgagcagggtcttcttcatatggaaccagccgaagccgatgaactggagcatggcgagattattgagggggatcatggtttcagcgacgaagaagaatcagaagatagtcacgctggatttgggtttgttccctcgagacctccctcgctttctgttgcgtcaaggtatacctccacggaactacaagtatcaacggtctcgcacgaccaactgtccttgatgcaacccccacagtcaccaggagagtttcgtttgacatctatggcctctttaccaccacacccagatatgaattcgcatgagaggcaacaacacctcctcgccgccggatttgaagatcacgactctatggcaccaacgggcaaggaaaacaaaatcctccgtcttgctgatgccgaggacgagcagccgcggggagggggcgaggaaaacatagccgggggagaatcttcgatagatgtcaatatggaagagcacgcaggcgaacaagagaatgaagcggcagaaacagcagcgcagctttcttcatccgaagaagttgaaaaagcactggcaattttagaaggacgtggggcatcggagataacatcgggcccctctaggactgtgggcaccaaaagtgcggcgctgcgagagagcgctaaattcaaaccatacgaccgcacgcaacagcgcgaacaaacccgcaagctatccattccgccacaggaaactctggagcaggatataaacgcactgttacgaacggctgatcaggaacagacagcaagacctggtactcaaattgatttcctcgaagcacagcatcatcctttgttggagatgaatgaagagcagagttcatggcccgtggctagtcaagttggcctgactcaggaccagcaacaggcaccggaagaaagatcaggctcggtcgagttagaaccgcagccagaaatttcgagctcgatcgatcaaaactcagaccaccatggaataaggaatgtccgatcggaacaggaagaacggtcgtctgagtctgtaccgctggacgcttcgccgcaggttcatgttatcgccgatgctacgcagaaggacactctggtagagcgcccctcgtcgtcactacaacgagagtctcccgcgcagaccgatacgcgcacacggatagaaataactgggtcagacaagttgcccgaggaacaagacaagtctcgtgagcgaggagaaggagcgagcgatgcagccaagcatcctgcagtgacaatcatgttccgtgcacgtgatgaacacggcgactggaatcgcttggtccaccaaatggtggtcgatccatctgacccctctcctgttgggcgaatggcgtccaaaaacgcgcgagaacgtcaggcaacgttttatgaccagaatctacggcaggtcccaccggggcagtgctttgatgcggcaattgaggatggcacgaacacgatattcatgacattcggcgacgatctggttgtgagtgaagaggcggtgaattcgatcgcacgagtaattgaacccggtagcgatgatgatcggccgacaaaacgccggcagtaggcgataataatgcacttgagatctagatcaaaatacttgtatcccatatagaccgtagtcagaagaccgaggacccttatggtcactgagccagggtagccgccagttgacagctataaagcccacctagactaggagccgtggacgtacgtccaaagtgggtccacgtccactgtcttccatcggtggcctcgaatcaactgtgctaggtcacagtgcctaaagccaaagccttcccaccacagcttcccaaccacggacccacatctccagactcaaagcccgcttggacgcagatccacagatccattacatgactggccttaaggcactggatttgtgtctttgtcggcctggggacaacataggccagaaaacactcttcctccatctatggaagcgccatgtccagctttttagttgaatccgtcgtaaagctcatctagcctcgatttcttggtaaacgtccctaaaggggctcttgaaccctccagtttgatactgaaggtaggactggatacgggcgagcctctcacaccaagatcaatctcaacctctacccaagataccccttttccagctagcaaatgacgcaggtagcggggctgggcgttccagtggggtcaaggagaccatgaaagaaagatgatcaaattcgtgggccttgctccaggacgctgagtcagcgtcctggagcaatcacattgaggtagcatgtagacgacacatttcttgttagccactgatcaattatttaaactcatgctgctcacttcttctgatgctcctgtatatagtgctgcctcgagtttaattgataacaccgacgaaatatctcgttatgattcaagtacggccagagtaagtacgctttcctttcctctggaggcgttatctaaaaacacccagtcaatttatctcccccctcgcatacctggaggttggccccaacgggaagaaattcgctgcgcccagcgggataatccaaagcctccggtgtcgttacaaaagttcgcccgaaataatatatgtggttgacgacgatgttgaggatatctttggccatattcttcagtaccttcacagtggggactactctgtccttattccagcagccgataaatcgagtcatgcttcatgcgaagatgaaatcgatattgcaacgcaggatctgcttcccttgaaagaaaattattttgcgagtcatgaagatatccaggtgaagaccgacaattcgatatctttgccacattgtggggatggaaaccacctgtgcaaacatcccaagacactgctggtgcatgctcgtttgtatgacttcgctactagacatggattggaccaacttggaaatgtgagtttcaacaagctttactggactctctcggaatatccgttagattcagaacaagcggacgcaatcgtcgagcttttacgggttgccaatggaataggcaccatctatgcgctaatgattcactatgtatcgttccacctaaagactttcatacgttgttccagttttctctcgttcttggaagaaaaccatcatatcagcttccacttgttcaatctcttatgtgattccctgtgagcctttattcttcatagaagggcctagagcgctgaaagtatcctgggatattgagatgagatcacgtgcccctgggtacgcaagccagtcttagcaagacacacccggggaattaatttcagttatagtatttaagctagaagatctgcctcgcttggtttccttataataccttcttcagccttccccaggtcttgatccatgattaaaaatggggtcggataataggaggcctagaaaagttagccttggtcatgtgactcgtttctgcctgcatactagttgcgacccaagaaatccccaaaatcccgaggcatccgccgataggataaacacttggcccgtttctcgaaggcgaatcccgacgcagacgtctgcttcacacaacctactatattcgcgtgccttttttattaaattggatttgcgacgaccttgtttttgacgcattgattttcttttcgaagaagagccatttgaacgagggcctgtagtcgccatctgctagtttgtagcctgaaatatgcctcgggactctagaaatagacttgctggaatgtagaattaagaaataaggaagtgagtgctcttatagttatagacttgttggctagggagtagcttttaaagaacgtctaacgagggcctgtagtcgccatctgctagtctgtagcctaaaatatgcctcgggactctagtattagacttgctggaaagtagagttaagaaatcaggaagtgggtgctcttatagtcgtatgcttgttggctagggagtggcttttaaagaacgtcaaacgttatgaaagcacgaaaagcgcaaaagcgcaaaagtgcaatggcggtttttgaacatataaccgtgccaagcccaccaacacactacctgatattggtgggcttggcacggttagtaggacttcaatctagcaaacaaatcaaaccaccaattcaagcaccaacaacagcactgacgatagcccaatcgactgcaagtagggcacaggatcttcattgccaatagagtaagactattctgaacagtttcgtgctacgtggccaggctgcccacaactgaaacactgaccattctgccttcgctcctcagtaagttgacgttcaacagcgatcgctttctctgccatcttttcccacgtgtcaggaagctcccctaattgacgaagaccaatttgcaattcttttttaaggctaatgaagaaaatggatgcaataaatgtctcccgtgtgattttgcttcggagcttcaggaattcggaaacgtagtcagctgcgctcccagtctgtaccagacattgaagccgaactactgcttcgattctagtaaggggctcattcgatgccgacatgtctattgtcatgctaagagatatttcttaggaaatcaagatcaaaatataggacttacacgtgatagtatttgttcgcaatgcccacttagctcatgaggtgccttaacagagtgcaaaaagagcgaaaattaccactatatatctctagagcaaaggcgaggggtaggtaggagccgcttatcgattggtaggtggaagagctttattggaagcgcttctaaagaaaggtcctggccaaagtaacactgcaatatagttttatataattctaaccgccgaccctatctataccgatagtattaagttaactaaggagaagggcttgagactaggtataaatcgacctttatctactattagtaataaactgatcgtttatataaggcggcgcgaggccactactcagccatccgcgatataaagaaatacaattattattacagatttgggactatatatattgtatctgtgcagcgataaagctaagatactgctaagcagaacgtttatactactagcggtttaattatatacgcgctatattgtgagctccgagtatcgatcctaactatcttaataaataaaggttattaggtattactagagacggaggatttatttttatgaatttagatagttcgcaatatatccaaatatccttagaatcaaaataatagcgagggggtcacaaggttatagattaactaaagttatcctatagactgtagaagttagctaggatcgttaatcaatcgcagagtcctaaaattaaaattcgataaaccataggaaaggtcgctcggtaagagaatacggttattattaataatccttaaggaaagcttatctataagcctctactccacttacttttaggttacttacaattaagctctatagctctaaagagatctagggcagaatcaccaacttctcagtcggatcatatatataatattgtaagatacaatactttatcaggaagatcttctacattcagcgttataatcaagatacgtaaggtgattgaaataaagttaagggctgtaggagtaccggcctacaatgccgacccttatttaggagccaatcgatgtctctgttctagtctaaaaaccggagatatttttttaccttatatagcttgtctgtagttagtatattttctataagctatctactagagatattaaattagcaatcggatttagcagatagagaggatgggttaggcttaaagagagtatagtttgtacgaggaaggtttatataagacaaaagatatagcttctagaaccttctatagactagataaagatagcagcagcttctgtatgaaggaccagtctctcttgcgagggtaactaaaccgtagattggacctcgttgagaaaagtttacgatattctaaataccttatctgtcccaaccgactgcccaagtaataaagacctgtcctatctgtactctgacggcccgtcaagactaggttttagatcgtgtctggacccttgcagatccttccgatttcttctgcgggccacaaatggaacctctgtgatctactatcctatgggtcgtccctgggatctgtatcgctgaactgtatctacgtctgtctaaagtcacgcgcggtgtttgattggtccgttgggtgctatttgtatctagggtatcattaatgtgacagtagcgttgcaatctttatgagggggtggcgatcatgagaacctaactcgtaggccatggtagctgaaataactcactatattgtccagtggactcaggtttactctagtttactctaggtttccaataagagctagactttttgatttctgttaaaaatagaaaactaataccttggatttgggggtattttcatagtgtctgtaccgataggtagtaaaagaattggtagagacaccatcagttggttacgaacgacatacaaaagtaccatttgagtagtataagggtagaattagacaaagaggactgtaattggataaatgggaggcacgtcctatagccaatatctggtacaatcgaatgtaactgtctgccacattgtccaacccattattgcggtacctatcgaagtacttcaacccttatgaaatagatagtaaccataactagtgactatggtcaaaataggcaaagtaatctaccactgcattgaggcatctaattgcaacttaagtgatatataggaattagatttttgcggcgttactttctgctcaataggtaataataatagtttaccacacttaacacaggttttaaatgtaatgaatccaggttgaaacttgagtctataggccacaaagtctcctaacgccatttcaatgttattcaaatgtctttaataccaataataagacggtgattctcgctactatctgcgcaactggttccttggtcgagacgtagccgaaaaaatataaaagggtctagattcctagcccaaaagaatcaggacttcggtcctcacactccgctgtgtcacaatgtccctctcttgcctgcgggcttgagcgtctccgtggctacggctatcgctgccacgagcccagcgatgtaagagggtgcttcgcaggataggtctgcgtcaacaacaatcctcgcaggagaccgctacgttaataagttctctgcaggagaccgctgcattaccaagctctccgcagcctaggtcctgcgtcaataacaatcctcgcaggataggctctgcgtcaacaacaatcctcgcaggatgggctctgcgtcatcaactgtgtctcgcaggataggctctgcgttatcaactgtgtctcgcaggataggcagggacatctgcgacaaaaagagtctccgcagggacatctgcgaaaccaagagtctccgcagggacatctgcgaaaccaagagtctccgcagggacatctgcgacaaaaagagtctccgcagggacatctgcgaaaccaagagtctccgcagggacatctgcgaaaccaagagtctccgcagggacatctgcgacaaaaagagtctccgcagggacatctgcgaaaccaagagtctccgcagggacatctgcgaaaccaagagtctccgcagggacatctgcgacaaaaagagtctccgcagggacatctgcgaaaccaagagtctccgcagggacatctgcgaaaccaagagtctccgcagggacatctgcgacaaaaagagtctccgcagggacatctgcgaaaccaagagtctccgcagggacatctgcgaaaccaagagtctccgcagggacatctgcgacaaaaagagtctccgcagggacatctgcgaaaccaagagtctccgcagggacatctgcgaaaccaagagtctccgcagggacatctgcgacaaaaagagtctccgcagggacatctgcgaaaccaagagtctccgcagggacatctgcgaaaccaagagtctccgcagggacatctgcgacaaaaagagtctccgcagggacatctgcgaaaccaagagtctccgcagggacatctgcgaaaccaagagtctccgcagggacatctgcgacaaaaagagtctccgcagggacatctgcgaaaccaagagtctccgcagggacatctgcgaaaccaagagtctccgcagggacatctgcgataccaagagtctccgtagggacatctgcgataccaagagtctccgcagggacatctgcgacaagaagcccctctagcccgtgcaggtacctcttcgtggtactagggaccggtattcgagtatcaagagtactcgaagaagcaaagacctgtgtactatcttgatgatatattttgtatttcgaatgattgtctttagagaaataaaatgagccctagatagaagtaaaccaattccaggattaaaactttaagattcaaccttcgttatcgagtgctgtattcctaaccctcctatctttatggtttgcggtcggctagtcttcccgccgcaatagaatatatctaccatcagagcgtagagcgaataaaatggtgagtatttgggtgcgttgtggatgtgttgactgggtgttgatagtcgttgatggttgttaatagtcgttgatggtcgttgatggtcgttgatggttgttgatggtcgttgatggtcgttgatggttgttgatagtcgttgatggtcgttaatggttgttgatggtcgttgatagtcgttgatggtcgttgatggtcgttaatggtcgttaatggtcgttgatggtcgttgatggtcgttgatggtcgttgttgaacgttgttgaacgttgatgagcgtggacgatagtatggacgaggtattgatgtgcgtattatagtatatggccaggcggtgaagttgagtgatggtcactagacttcagcaaagcccaaccaagcccatttctatgcacacacctaccgtcttggcattcataaccctactgattaatgttatttttatacatgttctaactaatctgtaagcccagatctcggcccgacgttttccctggcccaatccgggggttcaactactccaagaagcaagatatcaagtattaacggcaacgacctggtaataaaagtcatggaaatcaatggcgacacttaagacccgtttatataggaattaccaagaaaaagtcgagttttaccaggattttaaactattctagcacttagagaattcatgagcgccagcatatggttatatatatttcataaaagcagaagtaggcgcatcttcctatttaagtataacatttttaattgtagaaacccttatttttaggtttatagaattcaactttatacctaaagctagctaatttcttataataggtgtccttttttatagataattgatattgggaaaatctacactacttatgcaaatgctaagaattggtatgtttatattaggccccacgaaagcctagggaacttctaccttaggcctatagaatatctgtaggttggggtcgggttaggccttaggcttttgccggtccggaagtctatatataacagaaatattagttttattattttattctgtactatttggtatcacttgctacgatgatcccctggtatttactcagtatttttggtacacagcctccaattcgattgagctagtctaatgcaaatactaatatccctcgataaagctataattaggcaaaaaacctacaattagacctaccaagtatagatgaagtattgaataaagagcgctcgaaatgcgttttattgcttaggtaattatagtgatacaatagactgttccttgcagtcgaattggccgctttaggcggcttacaagccacttactcctactctgctgtagaatgcctacacctataacggtcgcgagtcaaactggattcctaataaagacggcgaagaaattgaggggcttggcttgaaaatttccgattggcttcttctatatgggagccgtcgcaccttggtcagttatagcaattacgattatattgcgagcctatctcctatgtagcaaccacaccgcactcaaattggcgaccactgctttctaggcgtggtgtcggagcttatgcaatcaagtgtattccactgtatagagaacatggttgcagcccgatcgggtctagtaagcgccatcttgaccagatctgggaaggacgattccgccagcatttacgacggacttggattagagctgcagcacacatgcacgttaccaatgccactgaaagcaatcacatgaatgctgatcaggggaagaaatcttagtataggctgtcatagatactcagagaggtcgcacagaggatggctccgagtaaagttgtgcagatacccaactcacccttacaaaggatctacttaaacagtaatataccagtccaaagcgcggtgtgtctgacaaataattgatgctcaagaacagtcgaggtaggggacgtagagaactcagccattccctgagaaaactgcttacacgcgatatatcagaagatggtttcagtaagagatacaggcgctcgggttaactcacctacagatgcagtgacatccaggggaaatggtctttacacacgttactcggcttagatagaaatcagatccagccagcgtatatccaaagacaccacaacacttctgacggtgctcatgatacagcgtcgtgcatgtctggttgattcattttcacttgttcgtttccgcttattagccccacccgctggaatacgtcgaccggctcagcaacacggaggatcaggtgaaactatcggacagcatccctttgctcgtgctctctgcttgactcggttataactcgacatcctactgtctccatttatcggttcgtacctgatataggcaattttcatctgtaggctcgagataatggggtcccgccttaccttctccttgtaagtagacttagactcatagcctgctcgttggagaaagtaggactcatccgccatgagccagacagaaacataagcttatctcggtgtctattgagctgccaggaatcaaaagacgtgagattcgaatcgaggataatgaagatcacctactggacgtcaggagtttgatcataaggaggctgttctttcgcggtatttgaatgccgagatacggtagtatacgcctattgtcgcttgagctttgtatcgggtagatacattagtacctaactgatatagagtcaactgagagaagggccgagacgatctggaccttacgttagcttatcatcgatgccgccagtagttatatagaaataatagataatatacgatcgcattagtagaggggagcttgagcagagaaaatgagggcgtcctgttatacaatacgagttagtaaggcttaccacttagacgagctgttatgacttacctatttatagagtttgcagagggtacgctgtgtatacttgagacgagacgattagtaagctttatggttaaataagctcaccaaatggatcacttacaatcctttttggtaaggcaatacagtaccatttacgccatattgtattctggttcgttgtactctccggccgttactctaaaagactgggctgagtataaaactaccggcattcctcggtcttttagagttctaggactgaaaagacgcgagatgccaactgaggacagcgaggattacccattggacgctaggaattcgatccataaggaacctattctttcgtggtgtttgaataccgagatagacagtggtttagcccattatgccttaggctttgtatcggtagatatattagcacctgactggtatatactattgactgagagaagggccgagataatgtgaatattctagtcgtttctcgtccatgctactagtggtcataaggaagggatagatagcttgcgattgcgttggtataggggagatcgagtagataagtcgtttactcgctttatattctactcgagtaatagggatataagggacctcctgttatatgatccgagtcagcaaggcttaccacttggacgagattttataacttacctatttataaagttcgcagaacattcgcttgagacgaaacgattaattagcttcgtggtcatatcttaccgatgagatcacgtataattgtctttatcaatacagttaccattcatactatgttgacataatgttgtatccagtttatcgcactctccggctgttacttcgaataagctgcactgggtgtactgggcaatttctgagagctaaaggtatataacgaacctatgacagaaattgtacagccgtaataggataaaacctcgcatagggacggtagaggctcatacactctgccgttcatggtataagggcggtaaggttaaggcggaagacacaatagattatgcgtcgtagtgatgtggtcttatctccgatctagtgataggactctcaacgggtatctttcacagtggtgatagctgctcctacagtggcacgaaaatcagtaatggtattagtgattggagcacaaaagttcgtaataactaatatagcgcagtagaggatgcgatcaattactcacatttttataaagaatagacgtcttaagcttctgcgcagcgaaacttgtgatcggatgtccgtacctgttattagcccgttccttctttacctaattctttactgtgtggtttgatacgatagggctatgaatagtgtataggcagtggctttatatagagtactaacggggccgctgtatcctcagggacttctggtataatgccgatattcactatcgttcattagcttgtatatcgtcgatataatccatgactcacatattttggtagctaaaactagggactaagagacggtaaagagctataactcttgcgcttgtgtattgtggttaattgtccttggttctattgaaatcgcattgtctgcataatcagtagaatttaggcaagtcaggctaagaatcacatacctgcgatacgaatattcgcgctgtctcttaggaagatatacacagaggctgtatagtagataagttcagacagctgctgtgacgtaggcatctttgtatagacacttggacccgccagcctaagtcttgtctctttaattagctgggatgaatggcagtatatctggtgggaatcatacctgtatctcttataggcactgtctagcttgcttatctacgatgtattctataaatgtcagtacagtggaatttaatactgggtcaaaggtggagaacttctcaagtgacccagacataagcctactcgactttttgtaatcaaatgaataaattgaagagtaaatttccggggggtagagaacgtatttatagacttcccggctcatcctgtcgccgaagtgcgctgcttagaaggacacgttaagggagaactctcttaattgaggcctattgaaatccatttcttctttctaccgcagatatttgcagcgatatttctgatgcctttagatgctcagcgagagagataattaaaagtggtgttgaacaacagcatgctgagttggtcaagaaacgttggctgactgttgaatcctccacgactctttaaaattgaggcactgagtatactcaatccgcaatggcaggctcgtatttcttgttctgataccttacctgtgagtgactcaacgttgaatcaccgaaaagcgcctacaatttcttactcgaaatcatggacttttttcctagcctcgctttagtatggtgttggttttgttgagctgtaggtctgtccgaccagactgcggaaagcgagggcactgtaggacgtgctcggcccatcaacccgttgaagcttgacttaccctgacgttgtcaacactcaattttcgaacttgtgaccatgaaaatacattaaataaaaaatctagtttttttcccgaatttctttgtttaatgacgataagttctataatattccatttatcggatttctgagccatttaacgaaagggaaagaggtatctgattgaaatgtatatctttaataagccttcatctggccctcaataacgtgagcttgatcggtttcccgaccgactatgcctattgttgaatatactgttagcagccggctgaaaattaaagtaactacagttataatttgactgcttcgattgaccgttatagtgattgtaaaacctagcccataatttatacacgtacatgtgcacagtctataagagacactaaggatcgatggaaattgtattaaacagacccgtgactttctcttgcagacaaaatggagtccccaaatagctcaataggccaggaaaaagaaggagatcagcaaccccgtgaatttcctatccccgatgagatagacaaatcaaaggaaaattctgaccatgtgccattggtaagtgaaacgattcggcttcaaacgctttttctaaccattgcagccctccacttcgcagcaggaagcaggaacaagacacaccattacgaccgagccatttcaaccgatcttgaaggttctagtagacctcgagcgcaacgatcctgagttcgcctttccagcagctcgacttatcggactctatcgacacctataggagtcatatatatccaagcacatcgatagccagaacctagagcaggaaaaccttgtcttaaaggaggctggtacgcacctaagacaaaagagggacggtcttcaggttcaacataacaagcagctatctcagctacgctttttcgagcaggcactggaattatcccaggagaagctgactagcgtcctcgataactggaatcatttttccagtctcaatttcgcaaggctcttcaacgaagaaagacaaggttaaaggactgtctgttcaaggcgatgtgccctacttcagcatagaaatactatagttaacttttcgaattaaggagaagtactgcttagaaagtatattctattcgaagtatttgcaaaacttagtgtatagaatagcctcccatttaatttatactcactggaaaattctgaataacaacgcattttatagatcaatctcacttatagtaacccagtatattatacacaaaaaaacttggatcaagggataccgttataggtagcgcaacttgcgaaggaagtgtcaagtaagtagaatgtggtaagggttccatacaaggccaaagggacagacggaatccagtgcctatcgcaccaataccatgccgggatatcgtatctagcagctgttcgcgtacttgacagagattccacgtagctgtcctaactcagggtaggaagaacagatgctcttctatactatcgctagatttccggttcaatcacactagtcggaactctacccagtatacttcgttagagaaagcgaaagctgacatgtagaggaagagctcgctagccgaagtagacatagatagagggtctggacccgtctacttgaaagccaacagcttgtcgtaagtggggtggaaaaggcattcgatcaagggagagccggaagtcttataacctacaggcttacctatatccaagagagtctgccgcgaaccttcggagtcgatagtaagacagagaggcggtattggtatactagggcactcttactagatagtgtgaaggtcgagatccaaatcacagtctactaatattagcacaaaactacactgaaatagcgggtacagactatctttactcaattcttccattttgtttaagactcgccgttgaaagctagtagtgaaatacaaagtatagtaggtagtaattcgactagtattaggagggatagaacgctgtaggctgagtaggaatttgatttatattctaaaggtattcttaacagagtacagagggttctggctagatactaagttctcgaatactaaacgcttggttaatcaacagctttgaaacgttgataatattactaaagccaacgaaacttaaccggcggttgtataggtcttgaaaaggaaggataatatttaaagtaaaaggtaaatatatagtagaaatatctagttatcgatgcctataagcgcccaaaatcctaagattttaccctttaatgtggtaggtataaggatcgcccgcttgtaaggctgaagccacactattataaagggcttgaactgctcgcttttgatcctatagtattaatacctacttattgcagagctgtagaaagatattgctatcgcttactagccatttatttaactcttaaagctgttactgctcttcctcgagttatatcttctcggtagatttgacgacgtagcattcctataggcaaaagtacagatctagtagtttaaggaatagtgtagctaaggtgttgttatagtgtagaagtttcatgaactctaccgtaagggaaccgcgtatatacactggaacctatgtagtattagtgatctcgttcgtttataatcgaagagggcctgactaacctcagcttcgatggttataccatccaaagattactgttagtagctttgcgtcttattcttatcttctgcgttatgggaaatccgacgctgtctcttggccggtcggtgatatagggaaggtgaagttagatggtccatcgtggcttttggaatgaaatacaagggacattgtactcgagggtcttttatagccggcaatgacactgagctgctgtcattgctagccctgagttcgactgccttcaaaagagtcagtgaacggttacctcgacggttacctcaactgttaacgctcgatctcatctgctgttcaccccgaattactcaacttcatgcggaaaagagcaacagatgaagccttgaaacgaagacttgcaggaactacctcctaatagtggttcacatgtgtaatctttgaggcattaaatactatacatcgagtagtgttcgttgaagttggaggtgatgttgttgggtgcgaactatccaaaaggtggtgatatagatattagatatttccgctccaaatattgctacacagcaacagatgttgaagtagtgattatcgctcgctctcatggaccagctcggactttttttttctttctctcatttctgctccctggcgacagggctgaaattgtttgatcggagttatattctccagtccggttccgcatgattcggagatagtagttacccgatctcctacaacttccattcttcaagtcttctatatatacaccaaagacgcgaagaaaatgtggagatatctcaaaaatttattctctcgttttcaaaggcttaagcggcttgtttaacatcgaatccaagtcttctttcccagccgatcaaaatttctcccagatccatctaccgtctcttctgaatcggaatgcacacgacgatcagccgccccgtccccagaggtacccgttaacgaagatagtatatcacaaaaaggagataacagagatctcgatcggtttttaatttgccacaagagggttcttatggcagacttaaaataaactgatcttcagttccagagcctgtaagaagagtaacgagctaggcgactcggttatgatagaacgaaagtcttcgggtggctactttcgtataaaacatgcgatagtagcgagagaacgtaagtgattatatactatacacgagtactaaattcctttattaatgaactttaagctcgttactagaggtatatcattgatacagcccaactatagtggtttattatcttaagaagatcgaaacgactgattgctacagctttggccaaccttagtatatacgggggattgccgttagatttgcccctttggatagtctcttccggtttttgaggccttatcgggatatatagctatactaacgcggtagaatatactacttggctatagatgtaccaaaaaagcgaatcataagtttccgatattagcttgatctaggcgagtatctaataaacgtaacattcggttagcctatacttttagtcgacggctatagcgtctgcgcttaaaatataacaattactttgcagctaaagataacctctgcgctagtggatatatgaaaggtggcccttagaacagctggaagtacagtactctatctatctagaagtcaatcggtacagtgtttagacagtgatttatattatctgccaactagatacaccgcttacagtacagcggatcgcctaaaacttagcccgatactagttggatataagtagggctccaggctataataagaagattttctggaaacgcgtttgggataatatgatattcaaggtatagtctttcggctgaagaaatgtaattttaagtagtacctatgatcatataggaacagtgcaatgtatagatatttaagagagcagtagtcaggcaattcatctcgctaggtccctattatatacctgagcaataaagtctagacttagttagctaccaaaaattcctatcgtattcctaaaaagaggtttttaatttataggaactctggtcgcatttgaaaggattatatataaagtatatgtagtgtgtagataaatgatatacagaatacttgatatatcgagagctctcggttccttaaagcgaatgagagcctaacacgtacatcgaagtttctataggtaacccgcaacctcgccgactatactacctacagtagcagccggctattctactgatatatattcgtcgcaatagagcaacagtgatctggaatgagatatactgtagtacgtgatcgctttatatttgcaagtgctagatagtgatatacgtagatatgctattcgcagtttatttcatatcttaacttatatatatatttaatcaactaacattgttgatttgactctggtaatataggggctgtttaatctttaggaactcgtctttagatcctggggctatctcctatttctaggaaaccaagctctacccctaggatctctactatataatcctgattgaatacaaactggttttaggaacggattggctaggtttgggagctgtcgcgctcctgggaccctcctcctggattctagagttaatattctgccttcttaggtcgtggaaagccctcacaagacaccttcaccagacctgcgcacaaacctgtgtaattcgattactcccggaaaggcttagccatagccccaggagccgcacttgaggtttcgggaattgctaaaactgtcaacaggaacgtgactttggttccccgaggtgaaagtattagaccccagaagctatgtcgggcttcctgggggctacgtggctcccagaagctgcactaaagcccctgggagcaagagagctcccagggccaatatttgcattcccagggctaatggagctgttaacaggggcgtgactgatcttgtgagggtggaaatggagagtctagaggttacgtacgagtttctggggctatgtgatccctgggcagctcgcattattatcgggtcggcttttaaaaccttgacggccactaagattgatggatatttacgcagagcaggtcgttaactatcatcagtctactatatcaagctactcggcatactgctcaaatattggctacgattggctggctagttaaatcaatcgataagcatgctttggttccaattaggaaactagattggtagattatcttctcaactctgtaaagtccatgaccctactcatcgcacctctctaatgtttttggactatacctccatcattcttaaaaaatcatcattaagttgtgattgtttttattcgtgatccccgctgacttgttctttatagccctactctaggaagcagctcgaaccgcctctgactgttttttagctcggtacgcgtactcaaccagtgatcgcgtaagccatgtaaagcaagacgtaggagagacataatggcccctagaataccgaaagcggcctggccaacggctccataatacataatcttgtagtatggaaagtggctcgcactgtccaaaaattcgaaggatgtctgaaagccgtggacgtggctggccacataaccccccaaggagagaacgatcaagctcacaacgatttcaatgcaaatgtagtagaatcgagcggtgccgtcctcttgtagccacttcggatagatcacaaggacaaacccaaagatggaaaacagggctgagaccaacgccacaaccaccatgctcacgacaaccttatccatgaggctttgaaatgtgatgtccaaaatagagtcgctcgagttgacgaggtcagattttgcgcggtctcgtagaacgaccgcaaagcgtacagtggccgagctgagaccggcgagggccagccaagtgatggcaaggaaaaggatggcaagacgcagtcgaatcacagccctggtagtattaagaggcattttgtgtccgtaaaaacagttgagtcaataacaggaaagtgagtctggttctgttcagggcgatatatgaggaagtaaacaatgaggcaaaaagatgaagaacgtgaatatctcagggcgccgtgaatttatatgtgctatgcgcttttctcggtaagaatgtttcaagtagaagcactatttctatctttgagatccagggccacggaacccgtgtccgatccttggtgtaaagaagctctaggaatgacctcgtgtattcctaggattgaccgtcctgtgaaatggggccagtattttatcatcatctccaagatgggtgatggattgtgcatatcatatttcaagtcaaatagtgatcccagaaaaagttccgatacagacagattttgccttggtatttttaccttgagggacatattatgtgctattgattgacgaacttccgaacccttccacaggaagacaaattcaattttacttcgtttctgttgagcttactgaatttgttgccagctagaggatctgcttccaaccgtaaggcagccctcactgttcgacgaaccaacacggccgatcaaaaatcaattttgaaccgggaaatctgacaaaatcctgctagtggtcaggtaactaaaatagctcaaggagctattttctatgggcgaaaaactcatatgctgttccggttcagtggtttctttgttcaacgttgatgtaaacgttgacatcaactttctcacattattcaccacccgtacatctttaaaggtggttatcagagaataattagcggatgtttcagcacgatattaccaagctattgtagaagagtccaaaggcccagtgctgctggaagcacaatgatctgaaaacatcctacgggtggtatcataccagcgcgctactagcgggggtattatcgaggataccaaaaagccccagtactcctggaagcgcagtaaagactccactggtcgtcctttttactgtggcttttcggacggctgaaccatgacgcaatagtagcctccgagatatcggaatacaactccctcccgcatgtttctattcatgaccaactccaatctggcagccaggttgctcccgggaatgcgcttcaaatcaatttgtgggtcgggcaacatgtgaatacggcaaccggattaaaaaatggaatgattcgaccgtcattgaggcaaaatatcagcatccgcaatcctcctgggagccggcactgatattagtaaccagcgaaaacttgatagcggacatatatttcatggtggatgcttctgtgcctttcttttgttttagtaaattgccggtgcagtatcatcactagaaagaccaagcaatgatcatggatcatgagctgccaaaggtatcaaagaggtccaataccccagccacagaagagcacaatggacttacatggcaaactggtatcgttatcttagatcccctttgcgatgaatccatcggctgacaatctatttcatggaggcaatgaatcggcggaaaatttccgtcgggtcgttggccaatttacccatgggaatcacggccacacaagccaggctctacagccctctgttaaccagtccaccggatctgtggctacagaggtagctacttctgttgctatctctttagctagcccagggtcctacacgttgcctccaaccgccatcaaggctgaaaatcaagactttcccccactgaacgcaaaaaagagagcagccgagtcctcatttctcccacgaaaacaacgccgacattcgtactccatctctcataaaccgggtcgttcgcaaccgatacatcgaaagagtccctcaagccttacaacagttagtattgaaatggtcaacgacacaattcaatacctacaaacgctatccgaccgcatcttgatttttgacaccatttcctccagggagtgggccactatgcatcttgccacacgattgctacagagcagatacgaagatatcatcgccagggaaaagatggaaacagacgctgtgtccgattttaattccgcaccaacacagcaagaagagaagtgccggaaatgtgctgctgcagatgaggagcggctgtatgattgaggcgctttctgtgtttataaccttgctcgcaatgttttgataacatggtccttgaaaattgacgatcgaataaaatgttggggaaccaagaatcggtatatttaagaacgtgctgagcttcaagtctattattcatggatagagcactttcaggtacgaagatgggttgaaagttttcctgtaggtgatgtgagtccactcgacaagcaaaggtaaatatgtgacagtccggtgcatcttcatctccaatcaatgcaatggagattagaaagatcagaaagtaagtaccagacaaatcgaggattgaagcaatagcgttttcaaaagtcgagtcacctcgaataccaaaaccagccactctttgggttattcaacctgcttcactcgtagtaatgcaatggtttctgctgtaccatctacaagaactggaacatttgcgccgttctgctaatcggttcatgactgctggtccttacaactgcgttgatttgcggccattctgtgtctaagtgccagcacattaattcagatgcaccaataggacatcacttgtaaactggagtcgactctagtgttggcaagacaggaaagcctagagcctcgagacccagaacagccgtagcagtactattcggagaatcatgcgagggcgactcgccgtgctgaaaggcgggcttccaagccaaagtcatacacgaccataatcaaacccatcggattctctcccttcatctctcgaatatagccgttacggcgttaattagagcctggtcgcgtacaagtcgcgggttatcagtaataggatatatatgtgggactacccttgctcagcgcaaaaatgcctggcaagtttatcattccccgagcctaccgattactgtgataactatcttatgtttgatcccgttcgccctttgatatgaaaaattgaaaatttcatgaactaaacaagataagtgaggccatcattataaagaagttgccgcagactctggcttatttgacagcttgtgtcttatttttttctttcgcgctgtcagtcatttgaatcctaaattccatcgatgaacagcctcctattaccgataagcgctattatgtgtaacaagatcctaaggaagttgagttagggggccattatgttgagcaatgtggtcatgtgcctatttgtatagaaatcctcaattacctcgagactcatttttatgagggctgaacagcatataacagtcgcaaaggttatatatacagatagctgtttctatgtaagccccatggcttataagcctcttcttttgacaatcggtcaaagctctcatctcttctcattgacgagagtccaaaccttaataccgtgcgtataaataaattgaatttcacttcctctctttattcttgcaagtattggatcgggcaaaacatactcccgtcattatatcatctaaccagttcacaggcaatatgatatatgaccttaacactatcaatgctcaatctcagctccctatttcgatatcggcccccactacctgcgagagtcatacggcggccaccaagaaattaactgggtcccactgccgcagcaaactgaaggttgtcacggggcctcccaagagcctttatctaccccacttgtgtggtttggaaaacattgcatccgttttgattgtaagataggagtcgccgtgggatacctatcggaaagtcattatatataaaattactggcaaagtcactattgccacacgccgcacccgcccgtctcgcatggtagcaatccggatatatgcgaaagagaatactcgaagactgatatacagattcggacgtctggaacacaggaacgttctttcattacacaaatgctatatacacaaagatctcgcgttctttttagtggatgatttgccgctgacgctcgcgtatattgtcgcttttctatccgtttatcctaacgagacggaattgggatccatcgtaagccaggtttatccctttcgatgagctattctgactctttagatcctcgacggtgtcttttatttatttacgtttggccttgcgtaccaatcattaagctgtgatcatatattgtttggcattgacgggattatcaagataggtttgttggtggccgcatccttgcattatcggactaacacttcgcagcaagtttggacctttgtatagattgcacaccaaagcaatctgaagccgcatatattgcggcccttccttcgatcacaatgcagctcatgcagaaatttgacaaagatcaaggcgttgttggcgtgattgatctggagcgatggccaatcgattctgccgctgtgggttttctgtccgctaccgagacagcaggatcaatcaagtctctgagaaatgtgagttctcccagaaaggtatcatataatgctaatttccagcagcaacctctgttgacggggaagcaccgcccaagcgaggatctggtcgttctcgcaagagcagctctgctttccagtagtttgaattgcgtgtataatcccgattctaaaaagtgaaacgacaaggatatggttcacgactcttataaactggcgaattttcatcatgctcgtatctgtacggtttcaccaatgtgcaacgttctatgcgtctcctatagttctcttgctacataatagggtattttatttctttctggcaacccacaaacacaaggcaagtccgcagcgaagactaggaaatgggaatcgctttccaaggcgagaagctgtgatactagaatgggaatttgactttccactagcataggagcgtgtgccaagatagattgatcattacgcacggcgtacttttcgcgtcaagcgttctgttcctggtagctcacatggttttgtcgtaatccagtatatattataactgcagtctattctacttactggtataaaatcgaaagagaatctagacttaatatgaacaaaatgcaaaatcattttacaaatccaataggaagcaaagaatataaaagattttattggcgatcttctgtcttcggaataacgcccgaacataactaaaagtagtacttcaaagatgtctatttttcggatctgaataggctccaggtaggctccaggtaggctcagggtgggctcagggtgggctcagggttggctccaggttggctcagggttggctcagggttggctcagggttggctcagggttggctcagggtaggctcagggtgggctcagggttggttcagcggtggcagaaccgggtgtcaactccgatggggggaaattttgtgagttccccgcacggtattgtcacacttggttattcgttacccattaaacatcgctttatgttttgtatggtaagtcttaccataccggaagaaccgcgctgtaacatacagtaatagtgccatgccgactatcaaatctttcaataccggtagggtgttgatgggcctgagctttgtccgtaaggcgcggagtgtatatcgccggttcaaagacgcctgaagactggttcccgtcttactcgtcggtcgcaacctagcctgtgctgtgatgccatgctacagtctcaagattcggactcgcaatacatgactgcttagaggcttcggaaataacaggcaaacctatactactaatataggagagatagatgcactggtggcccgccccgtcagtccataaacaacaaggcctacgtctagctcggggcctcacgcaaaccgacacagcttggcgtgagacgagtattatgcttcatacgactacaatcataaaaataaaataaaataaaccatgacatgagaaacgaggttcattcgtgtggtgatactccgtaccttacaccaagagaataccctttactcggaattgaccaaatttttggaagcgaaaattcatcattcgtcttacaccgcaaagacccgctctacaaaagctaaacaggtctatagaccccaactaagatatatgatattgcacccctaaacctgaaccccggttataccttcacagagtgagataacggagaccatttcgtatctatgtcagcccaagggctgttttagaagagcgtgagacagttccatgcaccctttctgcatggttcaatagcatagactttgactccaacttctccccgcaaatagagcactcacagcgcatgtcatttgaaaacggcttgatatgcttactgacgaagtgtcggctcagagatccagagttcttgtacatcctcagacgttcgctctgtggcagcctaggggtactaaggcaaataaagtaaatcgttggtctctcttctggagatttgacgtaaactgaagcgatagctttggaaaaagcatcgtcgctcttagctgaaggggttgaattctgccttttaggcaggggggcagtcggtagcatatcgctagcatcggcggagcgttttcgggcgatacaagaccgcgagggtgtaacctcttctgtatcacagaccgcaattactgcattgattacagcaattcgacgctcatattctttctcaatcgtcgtacctggcatggtcaggacagtgtcgataagtgttatatgctgcggtgtcatatagcctgttcgctccagctcaactaatacttctttgttaataacctttccggaaagttgtcgttcgctgtcgaccactggctgttcgttcttgtaacgctccaggttctcatgaattaagtggttcctttgccgccctttctcattgtgtagttacttaactgagcgattatactgcttatctatatggtcgaatttttgctgtagccttttaactctcttctcttgagctttccgtcgcttgcggatcattcgggaatgagggaaattttcccccgaaagtttatcaccaaactcccgctgtaatgcagcccgggtattttcataggtgcgcttcttagcatctcgaatttatttccgcgcctgcttcctctcttctagagtgcagatacggggaattttattaatacagcttaaatcctctagttgatagggtctacggggatcaatagaccaactcatcgaggaggtaaaccgtatgagctgcttctaagcgggtaggccccgtacaattgcctgggcatctatataaatacctacgctgtagtgacgaataaaagtatcgatactagcatgctgcagtatcacgttctgtagttcattagacatatccgctattaaagagaagcattagcctaggatcctatcatgcataatgtctcactcacggctatcgttgaacgcttttgctgcgctatatcggaggcagtagggcttcgcgacttccgcgaaacctataatttcaccacctcgtttcattcggtaactcagccatcctttggtaagtttttcttctggtgcaattcgaatcccaccaggctcccgtagtgcttggcaaaacacgttttgatcgagaatttcgtcttttagctttaattcctgctcactaagaccatggaggacccggagacagtacagtttctcagggcaatccatcacagggccgtctttggacagacttttgaatgcaccaatcctgaagagcatacccagcagaaaaacatgaggactgagaaccagggtgggatcaaagatgatttccggaattgggaacgtgttcctattccaaaatggtgagcaagctttgactgggtccgttggcggaagaacttcagcatgcagaattgcgcagggaaatcaggggtgaattgaatggggagggaaggaagcaaaagacaggggacattcttacgactctttcccgccaagaaatgtttttgtgaattccggcctcaaataaatgaacagtcggggtcgtccatcatttggatctcgaactaatgtcaacttgaggtcctggaagcgaagtttcaatagtgcccctggacggttaccggtgatagcagctagctggcagaaaagaaggagttgtatccggtaccagccataaggaaaggtcatttctgttgtagatagaaccactcgtgtaaactcggccacatcttcgacatacatagtcactttcggtcgaccttttagagaaaggcttttttctgttacaactatcgcaagtacctattgaaagtcagcctagtcaatttttatcgatatagatattcaatcaggatcttacgtcacggatcttaatatggacatctttgctgacgccatgtccaacctcggccttgtagatcagatgccactacttccaaaatgcgtcgagcgtgcttttggtattcactcccgcggtgtgacgtccatcctttccccgtcgctggtcataccgctaggagaagagagccttgaggaagcggaccgtctcctcggtattagagagccagaacaaacattctaccggatcgcgcttcgtgcctttgcagaacctagaacaatcagcgaaccaagcaaggtagaagtttgtagtgaattctcactggtcctagaaatattgcgtatcatccaaatgcctttgggtatttgggctgtagcgtttctgtcgaagctgggagacatcaagagactcggcttcgtggaggtagtattctggtggaagttgctcctcttcctcttccgataccagctcatcttcggactcatcttcggactcgctgcttgagtcgaagacgctgggctcggtggaggaatcagtgtcggaagcgtggtccgaaaaaacctcagaatggcctggggtagtatcgctctcgttggacggaacagaaccatcaaatgacatggcaggagggggtggatgcgatcaaagaaggtacaaggaacgaggcaagtcaaagaacaagtaaatggtagagactggttctctcttcacacttgagtgccgtgccgtcgaagagaccgacctgagagtggaagagttgcttggtagcaagaaagaacattgtgtcggggccatggcagtcgatatttataaaaactgagggaagaagggaaccaaggaggggagccatccttggttcctctccttcaggaggatggctgagggtgggtcgcggcggcggttgctatagcgcgagtggtctcggtcgggcccaggcaccaggcacagccaacggaaagcatgggtggcagttgagagagtcggtcgtgggcttagattcacgtgatgccaagcccgacaacggtgagtggaaggcttaaaacggcccccgaggcggccgtttctggcctcccattcaccgtctcattcttatgtgtaggaatatatatcctacttaaactgtggttcctacgatatactcttataagggtattaaaagctacaattagattataaactatatctataactaccttaataaacttagaagggaaaaggaactgtacttccttattatccttatctaatatacttatagctactctaagggtccctctagttattaactaaaattactctatctaggaaagaactactagtaactagaaataattctccttaatactagtaggaacctagttctaaggttagtataagttctattagaatatagctaaagtagctaaaaagatataccgaattatatatatagtatactttcgaataatatatataagatttactatatagtatatcgatatagtactagattactaaagggaaacgataattatccttatccttaccctaatcttagttagatacttatatatataagagatattaggcctactaataaagaatagggtttataatagttttctaatatattccctttaaactaatagtctttactattatattaaggatttaatactattatataagtaaaataattagaagaaaggatttagagattatagaaaagtagaagggaaagggtagtaattatactataactataattacctactataaatctattaaaggaatatnnnnnnnnnnnnnnnnnnnnnnnnnnnnnnnnnnnnnnnnnnnnnnnnnnnnnnnnnnnnnnnnnnnnnnnnnnnnnnnnnnnnnnnnnnnnnnnnnnnnnnnnnnnnnnnnnnnnnnnnnnnnnnnnnnnnnnnnnnnnnnnnnnnnnnnnnnnnnnnnnnnnnnnnnnnnnnnnnnnnnnnnnnnnnnnnnnnnnnnnnnnnnnnnnnnnnnnnnnnnnnnnnnnnnnnnnnnnnnnnnnnnnnnnnnnnnnnnnnnnnnnnnnnnnnnnnnnnnnnnnnnnnnnnnnnnnnnnnnnnnnnnnnnnnnnnnnnnnnnnnnnnnnnnnnnnnnnnnnnnnnnnnnnnnnnnnnnnnnnnnnnnnnnnnnnnnnnnnnnnnnnnnnnnnnnnnnnnnnnnnnnnnnnnnnnnnnnnnnnnnnnnnnnnnnnnnnnnnnnnnnnnnnnnnnnnnnnnnnnnnnnnnnnnnnnnnnnnnnnnnnnnnnnnnnnnnnnnnnnnnnnnnnnnnnnnnnnnnnnnnnnnnnnnnnnnnnnnnnnnnnnnnnnnnnnnnnnnnnnnnnnnnnnnnnnnnnnnnnnnnnnnnnnnnnnnnnnnnnnnnnnnnnnnnnnnnnnnnnnnnnnnnnnnnnnnnnnnnnnnnnnnnnnnnnnnnnnnnnnnnnnnnnnnnnnnnnnnnnnnnnnnnnnnnnnnnnnnnnnnnnnnnnnnnnnnnnnnnnnnnnnnnnnnnnnnnnnnnnnnnnnnnnnnnnnnnnnnnnnnnnnnnnnnnnnnnnnnaatatatataaacctatataggcttaggaaggaatatctatattattatatatctattttgatatcgatccgtaaggggtttattatataaatataggtagatagatttccttatagtttaggaccccttaggggcccctccgagactagtaagaattagtcttggcatactatcaatacattgtattccctctataaagccctttatatcttacctagttgacaggctatatacctatataacgtatacctttacatttaccctactagaaataagaatagtttagggaattacttagaatatctaagattggtcatctgatcagttataaaagtagacgttaaagagaattttattaattaagatagctcttaaagctctaaattgtaatcgctttaaaagctagggggtgtatcagaatctaggataaatactgtcatttttcatccctgatacagttaggtcacgtaactgaccaagctggtttttctgcagaaaaactaacttagaaggttttccacctaaaaaactagtcccgcagttttttacctaaaaaacatcctttcttttattttatttattttaattactaagttgtctatcagattattatattttaggactattattagtttaagggagttagagattttattaagatttttctgccataaaatacactcgccttaccaccgtttttctgttatatagtaaattagatatataaatttaaggtccctactataagtactcaaaattttaaagggttaaaatatagttaagaggtagttatagtatatataagaaaattacccttttaggataactgaccttaaaatataagcaaattttaatcgctcactataggtataatctttatctaaattaaaagtagtaaactagatatataaatttaaggtccctactataagtactgaaaattttaaagggttaaaatacagttaagaggtagttatagtacgtataaaatatagccgaattaggttagtatcattcttcctatagccctaaaccttaaagatataccttaactttaaccacaaatttcagacgctatactagccggatacgaaagataagatatgatctagaatacttaagaaaagggctttctagtgatactaaaataataataaatagtcattattttataggtacttagactctatgatttcctatatagagttccagtgcagataaatgtgaatcaggatgttgctccaaagaaggatactgcggctttgggcctgacttccgcggagatgatgtgtgtatttcaggctgcgatgctatagcagagtgcggtggtatgttgatctcccttcacttggtatcctctggaaattaaccatttgaattatagaatttgccaaggtcactgggactgagtgtccattgaatgtttgttgctctgaattcgggtaagctatgatggtgaacttgaatcctgtttctcctttgctgattttataatttcacagcttttgcgggacaactgaggaaatctgcggaactggttgccaaagtggttgcgaccctgttaatacaccgtaagcatagaagacttcgctgaataggatctatcattctaataggagccatcgctcagatcatgtggtagaaagtcgagtgaggcccggtatattggatactacgagggctggaatacgcagagacaatgcgatactgtcacaccggacaacatcttgaacgcagttggtgcatgctcggaggccacaatggtatcactgtctggggacttcacccagtaaagatgccgagtttacctggagcgaataaattatctgaccccgccagttagccagctgcttcgggtgttaattttgggcatagataatttcaggtacctttcgccactgataggatctctgtacggcggcggtgggagttgcgataccctcacaaatacctcgggagaatcgcgtctcaagtggacgtctgggcataactcccatggcccaatgtaacatgcatggccttttctaaaacctgataccatcgacgttttctagcttgcgaattacggcttattctattcttgtatgcgtaataacactgctacgggaacatcactggtcaccggcacttggagatttactctgagtcacaattctttctctgagacgaaagactgcttacagaggggattggagattggaagatatgctcgtcttatgctactcgtatacttgaagattgactggcgaagagaaagatggagtgaaattaggctacgatgatcctgacagtaacctgatgccaacctccacatttgtgttcaagtatggggaaacctggggactcccagggaaaaacccgtaccaaggctgtcatagcaacagataatcatatccaaggcctttggtaaatatgtcagaatataaatttcttcatcaaaatcaggcgagtgagaagaagaacttacttctgatcaggtctgctttgatcctggtgcggtacacgtcgcggtttgcgaagctctcccggtacaatagacggctgtatgcacccaagaatatgtttgcgcaggaataatcgatgagtagggctgaagcgtagtgacgcagctgtcgcaaacactctcaggccctttctggcaattgaagcagtcgcttgggcgtttctggtcgtccggaccaggttggtcatattgagccatcgccgaggttgctagggcaatgagtagaaacaccagtctcattttggccgattcgcaacgcaacttctttttgtctatattagattgtactgcgaatacgtcagtatgttcagaatgcacgaacctttatcaaaggggatatcaaggtaagagtatagaaagcgatcagtttcaagtttagggaacaaaacaaagctcaaactacaattcgacgactggtttatatatatgcctctttcacattcaaagtatacattcagggtaagtgagttatgatgtaatatattcaggaaaaggtctaaggttggagactgagtctccgcgaaacttgtgttacatcagtctgccaaatttgtccagagcaaccagaatagacagcaaaggttctagaagtgtcattatgagagggctgtttgttagctgggtagtaattactaccaaagaaaatcgcgcaccatacttagtagcaaccaaaatgattaggtttggaatacagtgctctcttcattggttcatggtggagaagcatgtagtgacaagtagagctgtggagtatataaattgacaaggacacctgatagtcttgtaaatttggcaaacttgcaacctagtagtatggcagtattgcggatgatgcctacacaagtggagcattgcatatacctagggggtccagagcctgttttcaataagcttctcggtaggtcgtaaatacaattccaaatcgcactcaattaatggatccaagctcaggatcgatgcgaaatgacctttttttcgagcatttccattggcggccgagggatgcgacttgtaatgttacaaaacatgacagagcgccgcgggttccctatcagtcgttttctctacgctcaaccaattgtcaattatcctgttcaaggcttagcgcattccattggaatgaccggatatattctatgattcatgtctctaccacagatactcaaagcaggcggttgaattatcatcttacatccctttttcaaaatctctttttggttcctttcaattagtcatgatgcttctctcaattaaataacatgtacgtcagctctggagcatccagtaagctgcaagcaaccccttaatgactcttgactttgcgactcttcgttaaggaagtgtcatcgccggatctttaaggcggggaggtttattaaggttacatgactgctatccagtaggaagatattctcgaggctactctaggggcggtccttgaccggcaccacagttgcagtgtcttctgcgtggacctaccggttgcatttttggtatgaaacaattcgttgagttttcttacatgcaccccaactgctctggcaatacaacagcgcgtgttcggtaagtccgccaaaaccccaactctgcgagcgtctaacgcacttgcactacagaaaccttttgatgggttgattgatttagttcccctgcatctcattttcgtttcttcgtgcaacagcgaccagagcaataagcctgtcaacgcagatatcgatcctcaaaatctcctgctcaatggatcaggataaatgacacacacacgtacaaagacaatagtgcaaatgatggaattggggtagattttgtccatgattcaaattgctgtggttgggtacaagcgggaattgccgtcggaccggaccacccacgggcgctcctgagctcccgagctccatcacacccgtgcgctagaaaaccttgaaacaacaccccccgccttagcgatggccacactaccgcgcctcgctcgaacgccctttttcggcgtaggttaccagacgcttgagtgctcaaaagtatactctccacaatcacgttactgacaatgaaggcttcggatcattgaaactccggtaatcctggacagccgatttcgcaccaccttctactgcgccgttttgctcgaatccttcaaaacaataaatttgtttagttcaacctgaagccccgagcctggagcgccgaggttagtatactgtatactactatggtagcgatatccggaaaggaaagctaaacattctgcacagagcgaaatgagtttccggtttagcacgaccgcgtctgcacaacagctggccgacaacattccctaaggcttagcaatcctcaatcagaactacgagctagaacaatgatcgcgtgttccgacgcgaagtctctacattgcttgctgcaatcgatccacctagatgacgcccaccgagttaatactaggttcaacgacgctttgtcggccaaagcagcgctgcgcattgaatactggacttggaatcaggacatgtggtgtgtgttgacttcaagtcctcttcttgtatatagtcatgatcttggccttgatgcctgtggcgggtttatcgttataatctcggatatcacatcagagaagagggcagagtatgcctataagcagcttgctaaagacatacaagaacacagataaatcaagagcgatttgtcgataatgattagtcatgagatttagaaccctctctccgcgatattgtactgcaccgaggatatcattcaagaaatacgcgaaaatgaagactacgaggcgctgtgtcaggaccccaatactaagaaggctgatgcctgaagtatggcacctgtcatggtgtgtagagcaccccgtcctgggtgcgtgggggcctgtggactagacaggagcaatgcgtgctgcctgcacagcctcattggatcatgtgacccacaacctgtatattatcctcgcatgctgcttctttggggaagtagctattagttccaatataccactgcgtatactactatctctatttcccgatcctccattacatataacattcccttaggcatttatacctaggggtctcaccaaattgtagacatccctgctctttccaagacactagcctaagcaaatattattcccgatatgatcagaactgatggaaggattatcatttgaccttataacgtgccaggtggtgaaaataaaagttgaacacttgaactctattttttaatgggccctagccgactgatgcggaggaatgtggagctctcccgtgatcccttggagccttgaaaccctctagattcctcccatactatgatctcccttgatttgtgaataagaggggggaaataagccatctgaatactttgagcgtagcatagatttggcgcttgttaataggccttgtagtgctcaacgtagaacggcatgaggattccgcatggattattgttcgtttcgtttcgtttctaacataaatttacatttgaatattgaccaactttggtgtaaaatggacgagcctttcttgcagcaaggagcatatttttgtaatgctttttgtactcacgatacaggaacggaacatatggggatcatgtaacattcattgtttctatacggtaagcctactcaaaacttggttccaggagataaatgtggcatatatcttagctatagtattactcttataactattttagttatgccgtcatcggatagacagtgccatttgaaagaagctgtgagaggaagatttcataactaccaccagagtcctctccctacctttgtcggcctttttgaacagcaattactagtgacaataattcggcttcttgcttctgatcttcgttgaggattagcagaaaatgtgaaataggtaacattaattttaaaaatgaagaaagctaaggaatgcaggaaggaatctcctattttggataatgacgcccactgtccactgggtgacgagtcatggaataagatgtgcaagttagcctcctcccaatgcagccaagtggccaatgtaacatatgcactacgagtttggaacccgcttaagcactgcatatggaagggcattgcctccaatatagccaatcacgctatatgtttaggatcacgtttatttgttctctgggaaagtgtcatgcattgtatgcagcggtcgttttaatagagcagcaacgaatgtttagtggaagtttgtccaccttggtcgactgtggttggaaactagtcatgaactagtggtaagacgttcccagcgcgtggtaggcgctggcattatttacccgtgcgctatgttgtatgaccctggcttgctatagctcctaaacatgtgacttccttggctggagtgcaagggtcgtggtcatcaacccaactagtcgtaaggagcggagtagaccattcgtaaagaaattctttcaaccggttcccaaccaggtgatctcttgtcactacatcattcactgtggagcagatgttagtttggtatgctacccatgttgttcgaagtcatcggagcagctattaccgttattggggctattatgtgtgtttaactaagcgagagagggggttggttttccgtatttaaaatacccacacatttagctattgaggtagttttactgtcttaggcaggacaggacctctctccccccttctctctcacggtcaatctacccagttcaagatcaatcatagagacagtaagagatataacgcccaagtcgagatcaatatgcctgctgacctggcaggggtaagacagaagggccgcatcggtggacgagcgatgaagtcggtcaatatagaaaggtagtttagggtgaatcgtccgtggattgacatgcgcaaaaaatctcccacttaaaattaactggaatctgaatcttatcatatggtggttggccaacagctctttttccgttgataaatctagaaggtccagggatctgatactctagcgataaatacacaatcattccctgtacgtctgcgcctcatttacctacttacgttgtatccgaacaccacggcaaaaaaacaccaatgtcgaatttactctgtagagaactccgtagggctggataagtctggcctggcgcgaatagactgtcgccgaacccagaatctgtgaaaaagaccttcggggtattagttgtcggtcatacgaataaataagagacagcacaactgcatgataaagggcgaagaaggactaaaaaggaaatactcacagcattctaaagaataaatattaaaaagcaacttgaagtgccaccctgaaatcgatgctgactgggacattcccatcttgaccgaggtctgtaaggcttcaatagcacaccaagcagctcttgtacatgtgcttgagcctgatatttcaactttgacgtcgttcaagctggaagagatggtttgcacgtttcgggtcgcaagagttgatctgaggggcctgaagtttccacacagtaaaacatgagcctgacgatatagggaaagcgcattcgctgtaatcaccccgccggggtatcttggagagcaatggaagtctgggatctgctcggcgcacatacgccacctagccagagcttgttcaagtcgttgcgttagtgcctgggtctgatctaaaagccaactatcctggtagagatttgccagtggttcaacgatgccatgcaaagtcaaataagacgcaaaaatgctcagtcgaagcgagggcccactgagaggagaaaattttggccattgcgactgagaagcgaatcagcggtttgaaactggactttctagtctcggaccacgcctgtggggatatgctcatccgttcagattcttcgcatggcagaaaacaatcacttatatcaacattccaagagcagttaactgtttggaaggcgacgcctagcgcacccagatagacgtatatcgagcaaattgctctgtcaggtgacgttagatttgtacagattgtccaagataagatgattccacataccgcacagttgtctcaaagtcaatctacttctgccatcgtcgcaaaagatcaacgtctcctccgtctgactctggtgcgtaggggggcagctttctgcgttcaaaatgccctgacaagtcggaacattgattagtagctttactggagtagatcctccgaggagtgacagtgacaaaatactgcataagggcaccctctaaacaaaggatttttctacttgtcacaattatctcgatcagaagagaggctaatgacgctgcttcttggaaggtccggaaatctccactcttcgtaccgtttgccataactagaagaagacactgcagtacccatagctttttatctgcgatagtgagctggctcagttgaacctcttttgagtcagggaacatgcttcatcaatgggtttgccttgcgtacatatttgattgtattggctttagacatgcgatgaagcgaagcagcggttagctcatcgtcgtagtagatggcgccgatggatgccatggcaaaaatcatacatgggggagctaggtctgccttctaggttgacgtatggatacatggtatgtatatgaggagatgtgcttagtactctttctaatgtgaagcgactcggaaatgtgaaactgatgatatcttcggtctgcaggaatatttaagcactgtgggctgggagatccagtacgggcatcggtctgcggcttaccgacgtaggtgtatggaacgcggaacctaatttacgccacctgtgctccgagatggcaaaagagcctttccatgctggtgaatctattaccctcggtcgtgatttcgtggcagcatgatgctttgggggagaagcaaagctattcaatgccaagtcggattgcaagttttcttgcgctctctcggtcgggttttatacatatcagactcgaaagatcgcggaaagttgagagctgagatccaagagcctatggtcgggctattgatttccaacatgttagttgggtcgaaggcgggaagccaccctgtagctgttgagggctcaaccgcattttgcattttatgccgtcaccgataagatcgtgggactggatgtctgcatgaatattgattgtatggactctgacggatcattattgacttcctgactatgttgttgggttcccatgtggttccgtgaatggtgccttttcaagacatcttgccgaatgaagcttgcattgcaaggggtacatctgaacgggtgctcattgcgatctggaaaacatctggttaatatctcgggcaccgaacggtttgacggacctaggagagcgctcgtgtctgcaaatgtgttcccgccgagcgaatgcacgatcacagtaggagcattgttttccacggcgcgtaacgtcaggtcccgtagtatcactcattctcgtttattgacatgaaattagaatcgcccctagcatctctcattcccagattttcgtgttcctagtcttcaaaatcatgacacttgaaaggttaaaatacctcactattaggtgacaggaatgacttctgtactgacaggggccgaaattgccaaaagtacgtctcgtcctcatagaaagaaggatggccccgcttggttttctcccttcgcggatgtgtaagccgcgtaagccaataagatcggacagattaaattaatgcctaagatataaggcactgaggtcacatgctatctttattcctaccgcttctagcttcctgcattcccgttggtcactttatgcctgatattatcattggtctatttcctcaccgctcacgggtaattctgccagtcccatcaaaattcttggaccaacatagagtggtggaagcttgtacttgaacaaaagttttaagaatgtgcacgtatacaatctacactgaaaataggagtgatcaactaaggtaggcactgtgtaagatagatgatgatctagctactaaatggcttcatgtggacgaagacacaaatatcgtctcgtttgtaaatcaggagcagtatgttctacaaaacaagcaaggagagatatgccaacagtgtgcctgtaagacggataagggaaaaataagttgtaaataagagaggcagcgggtgaagaaaccaaagaagtctgtctgccaaactgcgtgggaaatagcgaacgcccaaatgcatcatgggtcattcataatgaacatagattctataatacatcatcaggctgataccagatattcaagccggcattatcaagatcccgctaatctagcaggtggtgatgtaaagaccgagactagaaaggttgttaactaatatccaagcagaaatataggggaagggaacatacggagaggggttgtagtcttcgaagaagttaaggtaggtgcttccagagttcttcatctcgaaggcgacagtctggccgccaggacaagcgaaggtagagatgacgtatgagttaccgggggaaacggttatgtcgccgaggtcctgggacacagaaggcaggttgttaaaggtagtagactcgtcgacagcggaagagagcttagcgaagtcgatctttccatcaccgctaaagctataggacgaagtctcgaggtcctggagctcggggaaaaggaataccaggctgcaagttttaccggagtcggacgagggaatgtcgaagttgaacgcgctcgaaatggtggagctcacggtaccattgtaggaagtaccaggcgcagtgtcaggcgaggaggagtcaacagggacaatcaggtgggggtattcgtagctgccagtagtaagagtagtggggcaagagctgctagaggatccagtcgctgtagtagaagatgcggaactggtggggacagatccactgttagaatcgctgggctgtgagcctccaccagcactagatggagaaggaacagagcccgtgggaacagatgcggtagagccggagccagagcccgtggccgtgggagcaggggcggtagagccggagccagagcccgtggccgtgggagcaggggcggtagagccagagccagagccagagccagagccagagccagagccagagccagagccagaacctggactggacgagacagaagagaaggttgaaggagcgctggaagatccgacagaagagggagcagcgctagcagatgacgacgagctgccagaaccagagcccgagtttgaacatgagtcggcagtcaactccacgttcacgcaaccggtgacatcggacttgttgggggcagtgtagacgttcagaccaccgttttggcccgtggcacaggcaacaaagtccttgctaccgttgtactcgagctcaccctgggagctaagagagaagccaggagtgggggaagcaccctcatcacactggaactgagtagtaggggctattcaatagtcagacatgctttagttgacataagttgggatggtcacttacgggtgagaatgcagccacggccgtttgagtcagtgatagcacctgtagaatcgatgcagtattgagcgggcgacaggctgctgtctccaatgcggttctgaccatcgcttagctggccaagttcgccggaggcaccaccggaagaggtgaggtgaaagcagcagctgtcgctacggctaacgagggcgttggtgctggcagcgaaggcagcgatggtgatgaagttcttcatcatgattgctcttcggcgaatgtggaagggttggtaataacgaatgaacagaatgaatgttcttttgaggaaattaattcaaagatcttcgagtgtgatatcgaccacgatagttacagcagaaattaatctagaggactcggttcgtggaaggcgcatctttatagaatgcagtggattagagatccagaattatgaatcaaggaattacatgttctagtaggcggcgaaactctccgatgcaaaaacaaacaaaaaatagaaacggcatgctgtcaggcaacctggcaccatgtgagtgaattgcaggtccgaaccagccggagcgagatgtggtagaccgtagtgacatagtaggcgctgtctaaaccagatatccatttcattaaattgtggagtagaaggccatgcttgatagtccacttacaaccaaacttggacatggatgtggacccttctcaaggtccatttgaacctgctatccacggtgcagttgaaggtggcaaaccaccttttccatggatcgttcgtggttgcattctccgaaaggctcagagtggtctaccttcggatagaacggatgaagttatatatcttcggttagagaccgcgggactttgcgagattgatcgaatgcaactgttaacaggtgggcagcattacatggcatggtaccccgatactgtcttctagctttggacaaaaatagctaagcataaacttgggtatgcttggtatactgccgacttccagccaacagaaaggaaatagatcgctacatacagggctaaaaggactagaccacgtcagtgataatagccgattcccgaaaagtccctgtctctggataaaattagaataagatattgagagctgctacagtggaccggtggaactgggacttatgcatcgtatgtaattggacatggacaagtgtatgacctcaagacaaatttcaacaacaaagaagaaaagacactggatgcgaagcggtttttaccaagtggagcccgctttattcaacaatagtcgcggctctctttgttccttgttcaccttgttcgccaccaccaatcatagttagttgctaccttgtgggagttacaaagtacattgtttggtttctgttgttcgtttattttttgtgcgtaatagttcacgccccacgatgcgtgtctttttttagatctattccttagactgacgatcaaacatcgctctagatcgatcgcaaacaccctaccatattgttttagacaaaatgatatcaattggaattcggacatattatttgatatgcatattgggtggttagcaagccttccccaatgctctcataaaaccccttattgtattgctttgttcaaatatggattccctggctgttggtcgttctaacttaaccccgccatgtcgatcgcactatggcgatcgtactatggacgcgacgatgagccaattggggagtggggctccatataatgacatacatctttacataaaattgacacgtcgtgcgtcatacgatggtgatgtcaatttcagattccataccccgtactccgtacatctaggtatatccacatccacccctttcgactccacaaagacaatccgatagcactatgctgtcaaagacaactactttttttccaaccgcagctgctatcaaggcaggagaagcttcaacacagtataacgatgctattgactggacggaggatgttgccaaaggttgctcatataacccagccatatcacaacttctgctttctatggctgctattcatacctcagtggacatgctcacacaggtccttcttgacatccctgcgcagtccgacctggtcagagctctgcgggaggagataataattgtgactcgggacagttaaatcaaggaaattcaacgactgaaggctgtcacaattaggaagacccatcatatatttccgcttttttcaaatattgactgatcctagccccgatgccccgtcttaccaccaccgacgtttgagttatcagatggagtcttcgtccccaaagactcttaagtcttgatctccgtggatagcatgtgggacgaatgtaattatgaaacctggagaagttcgatgttgatcgttttctctagatgcgtgatgttcccggccaacagactgttgcccaaattgttgcaccttctccgattcacttgggctggggctttgggcagcatgcctgtcctggaagatcatttgccgccaacgagacatgcagctatatgaccggacgattatgggcagtgggtgaatagtacaggctctggaaacaatccatggcgtttatttcggcctttacattacccagaagcctgtcgctcaaactgtttggggtgcgatcctatataagatcgattccaagggcttcttcaagatgagcactagtgctgacgcacacattatccagactacataagacgaagaaccgattgacctgggtaatggtgccaatatgcatgtttcatgaaagaggctacgggatacgggaatgggcgccacagatgcagaaagataggggtgcaatgaacatgtaccgttatgcctagcttctcaagggtcagctattctaaattcacctgtgaaaacaatgtcaaggaaagtagagaatgttcggagtcatgaatctatatttaattacattttattccgtgtttgaagcctattgatatctaggtggttttctactatcagatatgcaactattatgatcccatgccaatcagacagccgagaaaattatgaatgaatttactgctctttctgtcactttttcattgttgatgggtacatacatccaagcaaggcagagctgttcaagaatgtacgagttgactacttctacgaaggggcatagcgcgcaggcggcctccgtcgatatcaaaacattcctaccgaggaatgccgaatatggtctaattggaggaacaacaataataaccggtgaatttgccgagcatttgcaagttcttggcctattggcctaactattgtagcagcatatatatgatagctaatcaagatatccctcgttggtgttcttttttaccaatgtccgatcattgtcgacagtatgcaaatatataataccttgctcagcggccttgctatccttccgggagctctagcttcctggcctttcttggatcgcaccaaagagatatcgacaaccatctatcacaatgaccagcccaatgtgaaagtcgagaccatctttcaatttcccaacaatggctcatggattgataatatggttgttcgatcagacggcaatcttctgttgacgcgtctggacacccccgaagtttggaatttcgacaccacaaccggaaatgcgaccctcgcctactcgttccccaatgtcaccagctgcttcggaatcagtgaaattgaggacgatgtcttcgcagttgttgtgggcaatttctctcccaagaccttccagccaggcccaggctcgttctcggttcataaattggattttaccaagatcgatgctgaggataacgagcgcgcaccgaaattgccaatggcctcggaaatcatcgcgatgccagaggctgaggccctaaatggcatggccactttctcacaggggtcaaatttggttctcattgccgacagccccaagggagtaatatggaaggtcgataccaagacaggagactattctgtcgcactggatgataccacaatggcaccggcggagggtcaggctcttcctctgggtgtcaatgctctgacaatacttggtgactatgtgtactataccggtacaacacgaatggtatattgcagagtcaaggtagacaaagatgtcaaacccatcggagattttgaggtcattgctagtggattccttcccgataacgttgagatgaccgaggatggcattgcgtatattccgacagctccgcagaactctgttgtgcgtctcacgccttcggggcagatatccctcgtcacgggtgggcaagtatctacgcaactagcaggtccaagctcagctcgattgagcaaagaccgacaagtactctatgttggcaccaatggtggccaaattgcgccggttttgggctcattcatcgagcccgcaaagattgtcaagatctcattcgaaaaatagggaaagcctgatgcttctagggacgcttggaataaccattgtggacattcgaagttgacgaacgaaaattgatgggaatattgggtttctcggccagcttgttgtataattcgatttatgaagcattctattcttgaacacacgtgtctctctccgtcatcgttcacattccagattgtgtgagcaaaggaatgagagcctgcgaaggtatcagctttgtctctgccttatggtcgaaagtgagatagtatcctcactcaattgtatcaacccaatgttgtggatcttcgcacgacttaactcacgatctcgagcaagcgatgtaaagccggcctgtatataacagtataatctccaccgtatatcctgtaatgacagcgactctgtgatcagctatgccccgaagttgggctactttgacccagctgagctcgtgagtgactttggtctagttcattgggaattgatcaggagtatagacgaagattgcgaacttgtttcccgagccaaaacctataatcgtgatacatgcctttcataccagggagctgatttcgtccatgactccatgtggagttagccaaatcgaatggccttcataggcatatggtcaactcggagagtatcggtgaaaggtggcaaactgcgctaaaccgatagttatagtggtgtgcaccgcaatgtagctgttcgaagtcatgtgacttctctccaacaactattttagtcccagcagataggtagtttcctgacggaaaaacggtggtaaggcgagtgtatatgtggcagaaaaatctcaataaattctctaactctctaaaactgacaatagtcctaaaacatgacaatctgatggacaacttagtaatcaaaacaaacaaaacaaaagaaagggtgttttcgggcgaaaaaccagcctggtcagtcacgtgacccagctgtatcagggatgaaaaatgacagtattcatcctcgattctgacatttccttttctctctttacgcaattcatgagaactttccagagcgtctacatttcatccgtagactcctagattcatctccaatagtagcaatggacgaagaagctcacgatagtaagaaccgtgttgacctgactctggtgatgtgcttgtacctcaaacgactgaaattccaccacgctctctcgctgaggttccggacagtggacacctgaggtagccgcgaaattattagctaagcagtgccagccaatgacgtcatattgtgatgtctccccacgtaggagtaacgtagagtaacagcatgttgcagccttacaggaccagtttctcttctatcatacactcgaatttccaatatcaaaatgcctggacacttcggtcaaaaggtcctcaataccttaggtctcaacgaccatggcaatcaacaaaactcctcggccgtccatcttccaggcagactggctgtgaacaacgacgagcacggattgtcttcacctcctaataatggcacataccctcgtctctgcaggctctcagatggcaccatcctctcgtcctttacccgattccccgatggacaacgctcacttcgcgtcgcgaaaagtaccgataacggccgcacgttcgaggacttctccgaggtaaccaggggcgccggcgacgtggataacatgttcttgtgtgaggtggcgccggggacaatactagcggcctttcgcaatcacgacaagggtccaaatggccccacgtacttccgcatcaccgtctgccggtctacggacggaggtcgggtctggaaatttgcttcgcaggcagctgagaaacgccctcccttgggtatttgggaaccattcatgcgcgtcggacgccaaggtgaagtgcagctttatttctcgcaagaatttgcacataacaaccaatgtaccatgctagtcgtctcgcgggatcaaggaagtacctggactcaaccgacctgtctgcatggtgacaaagatcctcttcgcgatggaatgtgcggcattgcacgaacttttgataacggtcgcgaggctcttgtcatggtattcgagaccacccggtacggacctttcagtgttgaagcgcttatatcatacgatgacggtgccacctggggttggcgccatgaagttttccgcccacgaccgggtcataatgcaggctctcctcaaattgcctcttttgctgatgggtccatggctactatattcatgacagatgaagattccaagcacgtggaatgggtaaagaatgcctctatcaaagtcgtatttgctggccagccagttgatgggcgggttcaatggagcttgccaactcttgtctctccggcctccagcttctggcctggaatcatgacattggatcaccacaacgtgctagccacttatgaccgtggtggaccccttgcaaagactatcacctggcaccccgcgtaaacatttgatcccaggggtaccttctatctagcgagagtctgcgactgggttctagggttttcatacacattctttgttgtctaagtgggtggcttgtccttcgcgtgatactttgctgggcaatctccgtattccccgcacattcccagtggacttgatagtcccaggacatgcatggatggatagttgaatattattccatctcttatcaaagagcacacttgtactccacagtccactcaacaataatacgctgtagcatccatatggtgatctctctttcaagtcagctttttcgctgcccacctggcagtcaatatccgagatcggcctcacctcaccctgactcgcgtgtttcacatcggatgccgggccttggaggtggcgttcggttttcggcggatataaactatcccggtggctcgggattaaccgtatggggaaattgatctcggagttaatctgataatctgatcggattacaaaaagggccagtactatttatgtataaaggttcttctgggtaacgttggatgttcccttcaaaacttcatctttcgaaatgtcgaccccattacggaatattattgttgttggcggctcgttcgtcgggcgtgtgggttcattctgctgtacaagatgaaattcaactaatggtcaatacagatgacagctcaggagctagcatccattgtgccttcaacacatcgggtaagctatcactgagatctaccttcgaaaacgaaactaatggtttgtgcaggtcctcttgactgagccacatagccatttccaccaccttttcacctttgtaagttgacttcggtaccagtgaacgttcattccactaagccttcgcagctaacatgccccatagcctcggtttgcgattgttccgggtcaggagcacaaagcattcattccgtacagtggtatcttcaaggcgtcgcccaatccctccaaccatggcgtagtccaggctcgcgttctatcggtcaagcccaatcatattgagttggaccgtgaatggcatggctcaaaggaacttccttttgactatgtcgttcttgcgacaggcacccgtctctccaagcctgcggctatggacgatgatgataaggcatcgtcagtcgagtatctacaaaagcatcaagctagcgttaagagatccaagtcgattttgattgtcggtggcggtgctgtcggtgttcaaatggcgaccgatctgaaagaatattatccagacaaggaagtgaccgtggttcaatctaggccgcaggtgatgccgaacttccactttgggctccatcaccttattaagagacgatttgatgagttagggatccgactcatcactggctctcgagtcattgttccaccgagtggatttcccaacgatggtagtaccttcgatgtccatctcacaaacggtaacaccgagtccacgcaattcgtcgtcctagccaccggacaaactccaaataaccagctggtggcagacttgaagtcttctcgcccggatagcgagtcggtcatcaatccagagaatggatttattcgcgttagacccactatgcagttcctagatgaagaatattcgaacatgtttgctgtgggtgatattgcagataccggtgcccaaaaggccgctcgtccaggctcaatacaggcagcagttgtcgcgaagaacatactggctttaattgaaggacgcgctgccgagaacacttttgttaagggacctggggccattcatttgacactcggcatggtaagtcaatcaaccctttatggagcgagatttgaataggctgactgttgttttttagaaacataatgtcattttccgcaatcccgatactgtggatggtcagacagagccctggatcaagccaaaggatgagtaagttccttcaattccttatgccacgccaggagaagctaatatatttaccagtggccgagaggatctgaatgtggaagctatgtgggagagactgggtatctcggttgagaatcctcgtgaatatcacctataatcgatcacgatgagtgaaagaaagggaaattaatgccacagaggtctataaattgcatagggcaacagcgaacacgtcagaaactatcatatattattcacatccagtaaccctatcgtgcgaagacgacccgagtttcccgtggatcgtgtcaatatgaagaaattggaattgtagaagatcacaacattctgtttaattgtttctctggcaggcagcttgccgttcagttttctgtgttgccagcctctttgtgtgcctgcagagatgtgggatctgtatagagagattataatcattcccttagtatattgctatcacggacaatgcaaatcgtcgggccagcctagttgtttattatcagacagcataggttgattcttcgcaaaccatttgcagtgtgccgttatttgaaaatccggactaaataataataaaatcgcacatttaacacaccgcgatggaaatatctatagtagaacgacttcaattcactagaattgtactatctagacttgggtttgggtagggaaattcacccacctgatagcaatgggttcagctttggtgtttcataaaatatatataaccaggcaagtcaagttgattctcggataagtagactgcaaggggacctgccaggctcgtgactggttgggaatcaatagttgttctgctacgtctgagggcgaatgagaaactattaacgtgaaatccagtttgatttctgcttcgtgccttgaatattcgtgccccaggaacgtgctaagaatttccaatctggacatcgggaaggagctatttccgacgatgcggctttgttcctgatctgcaccagccttgtatccacagtgcggaagaagaagaatggagcttataggtaggtctactgcatccccttgatccgtcttgatccaagtggacgtgcgagcagcggccaaggaagaagggaaggggaccttggcaattcagcccacacgggtaaagattccgtgcctatactccttctcatttgcgggtcgggtggaatagggtaatagtggcgtctaccttgtccgaaattcactgctatctttagtccgatagaaaaggtcggaccatcgtgcacctaggccgtgttttctagtgggtcactccgagttctgcgcattttccaaatctgtgcaagatcctcggaaaaccccatatgatgtcgcttgaaggaacgacatgatctgcgttagagtaagagtataaggcctagagggatcggaagataaatagtcgccgatggtaattgctggtggatatcgatttccgtattgagtgtgttgtatgcattatcactggcatacctagagagcaggtcttcacaacctcaggaaggaagatcaattgtgtttgctagtgcgtcgaggcattgccgggatgcacctgtgaccttgccagacctctttgccctgtttgtgatcctttgtgctttaaggcctttgttcctttatgtctatgaaattattagagacattcacagcagtggttagatcgccattaggaatatatattctgttgatcacttctcatttactcagccatagagtaaatacagtctacatccatcatttactccgttgtactccgtatggctttgctggatcacttagcacctctcatcaagtctttcttccgaaacaaggatcggcaccgtcggggatgtgaggcaggtgggtttcataggcaccgctgtcccttagcggcgggctacggtgggcgatgcggcgggggccttataatcgccgacccactccagcccacgtggtgcaggacgaagtgatatctccttcgcttgtgtttggaaaaagagtgacggcgaaccattaggctattatattctacagggcaaagcggtgttttcaattataaattgagaaagattgtatgattcagtatgaacatgacttagatgactttggttcacatcatcttcaagagaacgagaaattcagactcgagttttccatgctcctccaccactcattgtaatcacagtcacagccactttctactgtgaacaagaggtaacaactcatgccctgtaattgatggtcacgtggcaactatcgcagtttcccgtgccaaaactgccaatccccacgtcacagctgtccataatggtagtcatggtattcacgatgtcttggcctgagataggttggtctccgctgccgttggtcgcgtacttcacgtagcagttgcctttgctgaactcggtaccgtcggtgtatgtcgccgaagtatcgatggcattcttcgcattaatgcagttctgaggaatgagggcaatgcctgctgcaccggagccctcacagctgcgtgaattgtcagtaattggtgggcttgaagttatagaatgtccactcacttgttgttgtatgctacaacgtgaacccccattgcgacgaaggtcgccaagatctttgaagcgtgcatgttgacgaataattttgttgttgggaaagatgtgaaggctgtcgagtgttcaggagtgaaacgaatttgactagtaaaccataggattcaatggatcggcccatgctttatacccgatagttactacggcctcctatgtcacttttcaaaacgatcgccgcaatctttcgagttagaaggtatgccgaatggatcagcatccttgtctactgactatctctaagcaagtgttattgacccattcgataaacacacgtgtttctctcgtcaatctaccgtgctaatgagtggagacagacggagtatatttaccatccgtgatatatggtagtctgtttctatcgttaaaagtctgcgggatagacggttacattcgccactccaggctacgtggatgtctactcaccaagccactgcgtcacctttacccgattaggaaactgcccttgggaagctcaaggtatgacatacgtattgcggatagcaggaatgacccattatggccttgagtgatcatatatccttatagatgtggtataaaaagttgccatttctccgacctttacttaacttcaacccacaagtgtcaatcgcaaaatccatcttaccatcttaccatctatcccacatccgtgaaaatgcagctctgggcttatctccttcctgtggccaccattggtcaagtagccatggcctacagcagcaagtaagtattacgtctacggcacctatctgagactgctggtttctaacaatcttcagctgtgaggggtctttcgtccttgacacggacctggtttccattgacaaggactgcgcaaaagccatctccaatatcgacacatcggcaacatacaacgatggcagtcagttcagtgagggccactgttatctggtctatgctacaaatggcagtggtgatcagcctgttagcggacagacgattcatgacgttgcccagagcattcttgatggctgtgcaaagaagcacgggagctatggaactggaaactgcgatgcctgtcatgtcactgtcaattaccgatcctgagaatgtatatagaacttcagagagatcgacgcgagatttccgttatctgttctcttttttggcaaagatgttaaatcagagctcgaaatgcacggtatacacttgaattttgaagtgaaaatttggttcaactactgcgcgagtcctcgtgcgcgtagcaaactgttgttgacttagatcaccggtctagcgatattgtaagcaatatatctgaatgaagttggccttgggatgggtcaatggctcgcagatgactttaatcaagtaattaggtggaaattttgttataacaagtgtttctaaaaagtaaattgatttctgcaagatttttcagatgggttgggtttgcgttttgttctatacacaatatatctcatttgagcgctgttggcaaagaagaaacactccagaaaggtcaaattacattgaataagctcaatttccccgaactacatctcaaatcacacaatatcatcagcagtgcttgattccgtggagctctggcaagttgactagagttcctcagtctcgggcttttcctcgtctggatgattctaatgagaccgatcacagtattttggaagaacaaaggagcgctatccgagtctcgatggaattgcccattgataaaatccccaacgtcaagattattcccagctgcactgcaaagatgcttctcttatgagtcaatgtaatcggccttcctcggaaatcatactgaagtttgaacacatagcatgagataaggaaagtgcggcattgtatagtgaagggtatcagttcttactgttacgcttcgatgtgaaggggaacccacgtgctgggtggcattcttgatttcataattcaatctgtctcccgaggtccttcggacagccctaagccggattttgagacggtgtagtattaagacagatcggcgagctttgccacgtccgcgtggagggctaatggagtcattgcctcttcacgcttcaatcttcgttctgaataaattgctggagatcagcaaacaattccacttcgacagagaaaccaatgagtatgatcaagtttcgtgggggccatttagtttctacgtcattgctcatagatctctccactctagattagcttctactctagcaagtagtctgtaatgacgatatcttccgtattaggaaactcctacggctgaacttactagaaatattcgcaaattaggactccttaaaatatgcacatgtcgaatttgccactcaggggtctttcctgagatatttaaaatgtgatgtgggtgactggtagagccaagtttcccttcaaaaagacgaacagttgttattgaaatagacgttacctaccggccagcctgcagcttctcctccaactctgttgttcaaacctttcttgttccgcaaaccccattttctcgagctttctacgatgcaacttattgcctacctgatcggagccgtggctcctgcaatgttggctatggcttacaatgataagtaagtttacgtcctcttgtccctattatttctctagcagacttggctctttcgttcggaatgttaatgagtctttagttgcgacggatctttgattccagcgaacaaagacgattgtctcaaggccatttcaaatgttgacacgtcggcaacatacaacgacggtagtcaatttagcgaaggcgaatgctacctggtctacgctacaaacggtagtggtgatcaacccgtcagcggacagaagatccatgatgttgctcaggccattgtcgacaattgtgacatgcaacatggaagctttggaaccgaaaactgcaattcgtgccacgtgactgtgaattaccgctcttgagggatggatatgaattgactactttggtgatatgtaacatgctatactgttgatgggaagtggttgggctgaatatgcgaatgaatgatatatcgagaacttgattactttccagactatgattagtagtttctttagagatgttgttctaaaattcatccgaagtttgtagaagtctaagcatttcgcactcccgatttcttcacggctgatggcccccctcgaggctttccacgggtgcttatatcttgaacctctgttggcacaaacaagacctgtatacatggtggaccgcaattcctaccgcaggattcgcctgcgtggagtggagatgaaataagacattcgatcaaaggcaggataacagccacatggtcaagtgctgcggtagcctaggtatctatgataagggcattgatgtatttctggcattctgtcagtattaacgagagcggggggaaacgagacgtgttccgccttcgagaaacatagtaaaaggaatcaagccactctttgggattgattattctcatcgtctgtagagcgtgatctcatcaaatcccatctcaattcgaaggccctggcgttggtctccggtcctctgggctccacgagggtcgggtcgaagaatccggacatccagagtggccccgattcttgtctggcacctaaaatgggttatcgagatgtcggcaaaacaccgaggtcatataagcgaagaagccgaaccccgccccgtatccgagtacagactcactccaatgaagagcattgactggaagagcaatggtgacaatgtgccattttgatggttactttgcagatctacctgatcaagagttggaaaacatggatggagccagtcaaaataagcctgaagtaacgtatcacagatagcaggcgacaaggatacgagggccttttgcttctcaatatttgcttagaatgccccgaggctaaggttatatcaagttcgcgaccaacaaacgtcggcagcttaggggctgccaccccgagtacgtgataaagactgtcaagtcgctaatcttgaagcttagggttacgacgagtgcagacatattgatatataattggcgctcatgggggatatgggcggtttgggtaaacaacatcgcctgctagcaatagagaactcgtatggcctcatttgccaatcagaagcatcaaattatctgtgtgaattattgggctcttataatatttgttgtatataggatcaatctgatagacccagctccgctagaatggcttcattgtgttctccaacccgtggaaccgaacccatctgagcgccatatccacctttttcggtggaattggttgatccaggaggcaaaagagccgggatggctcccatgggagttttaaccctggtccaccgctctcgtgcttgaagctgagcatggtcccaaacatttttcatgtcgttgacactagcattagcgattgacgcttcgtccaaccgagcgattgtttcctctgctgtaaacctcgagaacacgtcgtggataatagatttgagctcatcccgatttcgagttcgttgtgaattgctcgaaaatctaggatcgatggctaaatttggttgtgagaggacgccgttgcagaaactaacccattccctctcattctgaacgcccaacatgaccgactggccatcaccagcttcgaacggcccataagggtagatagccgcatgcgaggcacctgctggcagcggtcctggagcgttgtcgtatgcgtagtacatagggaatcccatccattctaccatactctctagcatggagatgtcaatatggcaaccctggccatctttaccacgttgcagtagcgccgagagaatgttgctgtaggcgtacattcccgcggaaatatcggcgatagagataccaaccttcaccggctcttttccagtgcccgtgacggatagcattccagcctcactctgaataagaaggtcgtaggctttcttgtcacgatatggaccatcttgcccatatcctgatatatcgcacacgatcaaagcagggtatttctcttttaatgcctcgtgagaaagccccagtcgcgcactagcaccgggagccaaattctgaacgagaacgtcagccttttcgaggagcttcatcaggactgcatggtccttggagcatttgaggtccagagccaaactctccttagagcgattggtccatacaaaatgcgacgctaggccattgactcgcgtgtcataatgtcgtgcaaagtctccaacacctggtcgttcaaccttgatgactcgagctccaagatcggcaagttgtcgcgtgcaaaagggcgcagcaatagcttgctcgaggctaaccactgtaactccagcaagaggcagaggcctagagggcgggttggaataatgacgcgatatgagatgtgattttcttgcatgttgaactacaccggacagggcttgtgatcgagaagtaagtgagaagaatgctttcattgtgggctgggtattagagcctgtcgttgcaatgccagctagttgtcttgtgcatttagaagattgatgcgaggtcgaattcccgaatgcataactccgtactccgtactagtcggcgcggagatacctcggtcagattgccgggagtcggctgtcggctatggtcaggtgagctgtgattggatattgttgcgcggcagtatcttagtcatccaccctcacagtcttggaagatttcaaggtcccttgttgtatgttggttgtatcttttaacttgcctatcatattcaaagcccaaaaaatcagcctttaaattaataaataataatctactgcgtactaatgaaatgaataagagaagttagtactccgtacggagtacatggttcgtgaaggcggtggtaggggcggtaaggtagtatccaatgagagagtcatgaaccagtggcctactcgtcgcccgaatgtcgaacacgaactttgaactccaatgttgtacaactctcaaaggaaaatctcccttttttggccaagctccgattctgataaacgccaagcacatcgaaacccacgcgaggcgcccaatgcaccaatgcacacgggaaaatttgtacttcgtacggagtaccctgtcggtgcaagttaagtgccagggactcccctggacaacctcgtattctcgaaatgtgtctccttttcgcctcatacccatacgataaatgtcataacacaccgatcgcgatcagatgagaaccgatggttggtgttccccccagcaaaggctgcctggcatgtctccaacggcgggttaaagtaggaaacccccagtggtaggctattttctttttgcggtaacactctaattcagtgtccggtgtgatgaaacccagccaagatgtcaatcatgcgagagaagagggaacccatgtcctggctacatcaggaaccggaaattctaccgtttctctgcatcaagcagtcatcaccagctctcaagaaccactttcccccgggcacaatattcaacatcaaatatggcgctggtcactgcagaagaagcgcagcaatgggccacgattccccgtgcgtctatggatgaggctctgatggcaggatcggtttcgaaggcgctagaccggcaatacaggaatggcttttgtgatctcgtggatgctatatttccgaacatttattacagctacagcactcacgtggaactaccttgattcgagatcgctcagaacgcccgtggcgcacgaattgcaatggaataggggtttcgcagccttgggagcttgcagctaggcatagtaaacggcgatcaacgaaatattcttgccagtcgagaaatatatggccgtggactgcgctatcttgttcaagccatcaagaatccagctacagttggcacggatgacaccccggctttcttgccaagaccaaagctctagtcgcctcctcccgaactactaatgcggagagagacgattcaatgagtgcaatcaacaacagccgagagattctgggcgatgtgaaaatccaaataatggctggtgtgagggctgatcacgaagggaataagaaaaagtgtgaggctttctttctttaaactgattccgcgttctaccaagaatgcatcggtgggatccactctcgagggtgttcattcgaccattgcacttctccgatagttgtcgcttgtactagtgtccgatcgcagtcgacaaaaaaaaaagtaacaccgtggttaaaactcagtccgtataagaatgagtggaaggtcatcaaaagcgctaccattgcacgcatttcccccgctcggaattatgacaagacacccaagtggcattcaagtggcattccgaggttgaagcgccgcatctagccctttgtgtgattaactcgcaaattttccagtttatcccgaaagatcgacggactgaaagcgaccgcactgtcttgagaaactgggcagttatggggatgcggtcatgtgcgacgatgcatcccaagatcatgacgggaaatgacattatcgcagcccacatgaggggggagggggctgggtcccattgttacgaagcaatctggagagaaggaacttaatgaatgttcgacgttgggaatgctggggatgtttcaaatccggcgatcaccggatcaagagaggttatgacatcgcagtgaagtaataataatgcattacaagccattatcattctattcaattgctccactagatcgaattctattctctgattattatattgattgcgtagcctttttcccagcctcgtttcatacaaattatgtacactctcaatcgcggtcttagcgcaatcgcggtattcagtgtaagctcaaaaaaagcatcgtgataatgtgaccataacgacgagatcgtcctgaaacattctttcctagcactgccccgtagaaccatgtgagatccagattgcacaaagcacaaggtgtcattgattgttcctggaggaagaatgctggggcggttttgtcacattttcgaaaccggcgatcatccccggggaaggtaagttgtcgtacaatggggaatacttgcatatgtactatatcctccatacatgtgattgatgtacagtctgccctcctcagctcatgtctcgctaatgtatgcttgctcgaaaacgcaacacaacacgggtacctggactctttgcgggtacttggggcatctcaagattccagcccccggtgcttgcgtggcccctgcagtgttcatccattcggattggtcacaacgcatgctaagcattctgctggacgccattagaagcttggctagccattgggagtgcttccggtggaccattaacgtcatacgaatctggattgtagcgagtcgcctacaagtgccgatcagaatcggcccaatcatcgtcttaaccaatcctccacaggtgtcgccacagcttgcgtgatctcgatttttgatgtttcgagaagcaatctattcttagtttaccaacgtctgcaaatgacaagagcgaccgagggatatatatatagaggatcaaattcgccgcctagctggttaccgcattgctagacttaccaactaggttcaccatactactttgatatacgttgtggacaaaatcaattctcacaatcaaaattcatctcatacattccctgtcatgccgtcctcattggcttctagcgagcgctctggctcggtcaagtcgcaccacagccccaagacttctcttcagagcaaggccgatcctaacatggccctacatgaatcagaacctagtgtgtattcccgccaaaatagttcatcttactataggacacccactgacaggaagtagccgccgtgaacctccaacctggatctcgggatacattctcgctccgaagcatccagcataaggaccgggaaggaaagctcatcagtaagtcaccgagtacaattatgttcgattagaactgcattctaacctggtgatagccgatcccgatctctccaacccaacacgcagccgactcgagcgcccgctcgacacaattcgatcgtttgatgcagccatcgatgcacatcgcaaacagcaacgaatataaaggagggatcaggaccaagtaattacaccaggacgaaacgaaggaacgcttcttaatgccaatctcaattcgaacacgaggtgtcgatgtataattaatgtgtataatggagtcacatggagatatcgaaattcgagttaactattctttcatctgtagcggggtgtggaaaatgagcggaaatgtagtctctggccatttattgcgacatgtaaattctggttttaaaaccacaaacccatgaagaccgcccagaaacatctatgacaattgccggtgtaggccttttagtccactaggattatttacaatttccaaagcatgattactactgaggggaatttacaaaatatatattggagggagtgagatccccacaaaatcaacagtcatgtatgttgtataagattctccacacatgcccattcgcaaagggtattgtgcaactctcgaccggagtttgccgttgtgaacttatatagaacgaagtcggtcggctattggaagctggcatacattgcaagcatggccgaaggagcgtagaatcggagaaaagccgacttgatctacatgtcgatcttttctagactacgttggcccgaagtatacagcaattcctaaagatccccatcgtggattgtaactaggttattcttaacttgctatttcccacatgagccctcataaccctgaatctctgcgacagtctaattacgcatatgaaagggaagaatgacatgcataaatacttgtgcatagatgaatcggccatatagagaaatcatctccgaggtgattcaagatcttggacagttttctttggccaataatattattatttcctagggccaagcaattctgtagacagactatagcttcaatctacctagcgccgaattaaattagatcttttgaggatagaaaaaaggagaaagccacccaatgtcggcgctataccaagaagccccaccacgcaccgcgtcagctgaattttttttaccttttttttcatttcaactagtgagggaataactgttaatttaagattacttttgatggctgcctatttcaatggggaaatgcatacgtggtagtgtctttgtttgcagatcgacaaagaactgccaaagccaagtccagttaagtacgtggagcctatccatctctctattattattcgttcggactacatgaaccgattcgctctcgagccctaataatgttctttttgagagactatctccgggaaaactgccatggcgccagtggcctaaacctattgaacgatggcttcaaagcacttgaccatattgggcatgttagcttggctatacgcgtccttttcgtggttttagagagagcaaatagaattggactatctgacactattaatcttactattaatggatttgaagccatggattccccccgtctttgaccttgctctcccatttcaccagtcattattcactcgtttgattccttgattccttgattccttaattctctctctatctttttcaatccaattattccaactacatacattcgctataaacttttgcggcatcagctccgcaagaccattcatcaccatgaaattctccttggtggcactggcaaccctggctggggttgctgttgctgatttggatcccatcatcatcaaggtactgtctttatacatgttacatgtattcaaaccgtggtgtactaaaactgtcaatagggctccaagttcttctattctagcaatgacactcagttgtaagtccgaatgtatcgatgtatctcaaattcggtgactgacaagaacagctttatgcgtggagtcgcctatcaacgtaggtcgtttatgcagtcacctcaacatcccgactaacctgtttgcagaggaaagcacgagtagcagcggctacactgaccctctagccgatgccaccgcgtgtgcgcgtgatgttcccatcatggctgaactccgcaccaatgttatccgtacctatgccatcaacgcctctgctgaccactcggcatgtatgaaactcttgtccgaggctggtatttacgtgatctccgatctgtcagaccccgatctatcgatcgatcgaaacgatccttcgtggacaaccaatctctttgcccgatacactagtgttgttgatgaactggcccagtacaacaacactattggtttctttgctggaaatgaggtttccaacaccattgctacttccgacgccagcgcttttgtcaaggctgctgttcgtgacaccaagaagtatatcaaggagaagggctaccgatctatgggtgttggatatgctaccgccgatgtgtccgacatccgtgcggacatggccgactatttcgactgtggagatgccgaagatagcattgacttctggggatacaacatctactcgtggtgcggtaattcgacctacgcgaaatctaaataccaggctcgtaccgaagagttcgccaactactccgtccctgtcttcttcgccgagtacggttgcaacgaggtcacgccccgcgagttcaccgaggtgaaggccctctatggcgataccatggcggaggtctggtctggtggtattgtgtacatgtacttccaggaggctaacaactacggtaaggaaatgattcctttcccacatatatgttcgggtaactgatcagacttttaggtctggtctctgtcgtcgatagcaccagtgtcaagaccatgtccgacttcaaatactattccagtcagatcgccaacgccaaccccactggtgtcaacaaggcctcctacactcccaccaacaccgccctgcaaagctgccctaccgtcggagccagttgggacgccaaatcctcccctctgccccctgccgccgattcccagctgtgcgagtgcatgtacgatgcctccgcgtgcgttgtcgccggatccctcgcctcgacgaagtacgccaacctcttcagcactgtctgcggctacaccgactgcagcggattgacagccaatgctaccaccggcgagtacggtgcttatagcatgtgttcaaccaagcagcagcttgcctttgccttgaacaagtactatgttgagcaagaccgtgctgcggatgcttgcagcttctccgggtctgcaaccgtcaaggcctctaccaaggccactggcacttgctctacacagataaaagaggctggaaccgctggaaccggaactgttactaccgaaaacactgcaaccgccgactccagctctgcttcctcgacagcctcgtcgtccacgtctagcagcggcgccatcagggtgcaccacagctcatcctttggctctttccaggtggctgcttacattgccactgcactcctggcgggtgttggaatgatcgctctgtaattcagtagatcttgatttttgtattttcttcgcatttggaccgtgtgtctgttatttcttttcgttccgacatctctgatcatgaagctcaaagcaattcatgttcgagctagcgagaagatagcattacttgcaccttttcctgattgattatcattgctcgagaaagaaattgataaccatcctattgaagcgtgcaaatcgttaagatagaatctgatttgtataccatttgttagccatgtctttttagcaatttcggttttagttctagtcttacaagcctcggtctcctgtctttctcgcattcttttcttctaaatcaccaatattttgtgtggccattcattgacgggtcgtcttactagtgcgtacccccgaccttcatttgatgttgtacatcgtgttttgagcccaggatgcagaagcatatcacccaagctctttgatgtcaccaacgtaaaattatcattaccttctcccagtctccccatccaaatgcaacataccgatatgctcactgtttattcttctcggaattaatttatattttgtctgaagtcaccccgggttcgaggctgcttcaaatagagattatttatatcatttgctgaagtatttatttatatcctcgaaaagagtcacccctggattcttgccatgtcatatactgctgaactcggatggaattcaatggcacctcatcctcagacccatcgtcggcatgggacacctccagctgtgttctggttttattacgcggctcattcgccggtcgtagggcagagttatccaactcataacctttagattggtcgagatctgtagttcgtgatctagtcccagaccggctggagaacttggatgaaaatatcatgaacagtgggcgcagggtcggcatgcaagcggagataatacccgttgaggattcaacgacacaccaggtgcaggatcttccaagtgtccaggcaatgtccgtcgggtcgaatccaaaaatggtagcgaagcgataggcactagtgaagacaacgctaagggagagcagcccggttagtctatcgtcacaaagtagtaatatgtaggaaatggatatacggacaaactacccaagagaaatattccaatcacggacagtcgatgcgtgaggcttgcgtgcagtccccacaccaccttgaccggtagagacagaatgagaatgtcggtgagaatgttgggtactgcgttcccgatgaacatgcctttaaggttgatacatttaccaggaatgcgcgtgtcccaggctcgcgggatcggattgcattggaagacgctcacgaggataatagcgacaagccaggagagtgtcatcccacccaataccaaggaggcgatgcggatttccctcgtggggaagatgcgacagtacatgaggaggatagaaattttggtggttgctaccgttgtgacgtacatgatctcaaatatcagtagaagctacttggatgttagcggaggtatcaactgtatcctctgtaatttgaatcggacctttgcaatcattataatgtttgctaacggcaagacctgagaatgtaaacccatgccataattagttactatcaacaattagcatgagaatcaacaacctttaggggaaatgtgtcgtacaagatagcatcaatccaacgagtgctaacaaaggaaagagagcgagcacgataaaaaagtcgtccaggcctggctttagtgatttcttccaccgtgcgagaaaccgtaaaatcacaaacaagacgcccaggacagtcatcgtgatcgtcccggcccgataggacccttggtagctatcctgggcattgtatgcagccatcgtgttgggacgttcgaaacaggccaagatcaaggtgcggcaatgcttactttaaagagaattgattcctctcatgcagcccccgaagcggcaaaagagacttgtcagagatgatccacttcaagtgtcaggattcatggttatccactattgagcgacaaacggtatgcctaatgtgtgcacgattaatattgcgaggatcaatccgtattttaatactctctgtgttgcaactagtaagaggactgcggaatactacggaatgccaccgcaacaaaattcgatgtgctttggtgcgtaacattttgagacgaggggatcatgttattcctccagtcgtatgattttcattatttccttcgtataggtttaaggttcagtcggccctgactagatacagggtttagtacattaggctttgggtctgctggtacttgttatcatatgtaacacttggacaccagttcctttcgactttgcgctgttgctgaataaaatacaagttgataggagagaatactgttttacaatgttgtacggagtagcacaggaaaagatatccgctgggaactccgggtattctgcatatccctgatgatctgcatgtcaatatcccacagcaaatcagaagcacgagaacaacgaacagaaaagggtatgctccgtaaataagaacaatggcaggaacaacggccttgttcgatcctgcgaatgtccgcctagcccgttgtggatcgaggcctctgccaagattggaaattccggcgaccacgtggatactggttcgaagaccccaatcggggccctttggtgcaatatccgaccggtctaacggttttgctagtgacgccgggaacctataacaaggtgaatctcagtcgggctccatcgttggcccaagcagtcggaatacttcaaggaaattgattataacaatagatccaaagagccaatcgttccacgtaccgaagaattgtgggcccggtataacctgcccagttcagtataaggagagggtgatcctttcgccggggtttgctgattccccagaccctggttgggcgtagatgtacggagtgttttcccaccccaattacacgatggccatgtttgagaacccgttttcgtcttcgcactaggcgcatgacaggccgctgacacagtcgacgtccttctagatctaaacgcacaagcgcggacttatttcggcccgtctgtgggcgcatcacaattaacgtctctcaaagaaatggtagaagctggctgctagattttggtggtaaacgactcctgtggcgaaatcgtcggcgccggggttgttgggggcctgggtacacgcagcggtgcaaagccggtcttcccggcgtaatcatggctgcatttgtgacgtcccaggggaaaacggtaaaggacatgctgggcggaagcctcctttcctggatggtcatccaggcgcagggggaggggtgtacacagcatcgcccttgctgccgttgtagtgcgtgctgccatggaggttgagtagtcgtaggaatcatcactaatttgtaaaaatacttgtcagtcaaatgcagacaccagacggggtaaccactaaatagagatatgaggtatcacttactggtgggagtaatggtaatagttgaagttcaatcccgcggagccgtatgctctgagtgtcagtgagagtcgatttggagtgttttcggttcttgaagatcaaatgttgtgaatctttaatttattacccgctttgctctatagatatatatatgcctctactcatctggtaaaagggttcacctctaacttgcaagcacacgacttgatatatataacttccctgctgcttttgtagtccgtcaacctatcatgattaggtcaagtcgcatctctcgtttttatatttctacttcatacaagaaatggcactgccaatttaaatccccgtgcatcctcgcctacagaaaaagacttcatttgatttttccaatgatgaatatgcaagctcgctctaaaaacgcaatgtccggaatttattgagtttccatagcccatacttcgcgatagtgaccgttccaattatacacgttccgacaagaattgcaaatgccgaaggactgtcttcaaagaagtttgtcacgttcattccaaacaggcccgccacaaaagttgacacggcaaatcccaacatgcagatctccagttgagcctcgaaaactaggatctgatttcgtcgtacatccaagattgattgaatggtctccgttgtgcgctccaaatcgcctagtaaagcactggcagactccgcaatagcgtccgtgctcttgtaatatgcctcgaggaggtattccacttcttggtgatcatctacctcatgcggttgacctgcctcccgatccgttaagaacatggtcgccatgtcttcatcattttcaagaatttcccgtagcgcggagcggaactggcgggcgcgctgctgaattgccacgagccttttcttatgattctgcaacccgcgcagaacagagtaaacaacatcttctcttgttgaatcctgcaagctctcttcagcttctcgacggataagaatatgctcggcttcaagagtcgcaatcacagaggcaagcgccgcatccactactcgtagctcaaatgggagtttggataaaagaccagagccaggacagggttggagcctgccctgaaggtctgtcataaagacatcctgcaccttcacgtgggagttttcaattgggagaagaaatagaagcactccatttttgcggaccaggagccgtaaagtaaacatgctgatgaagataacagacggacggaccaacaaatgcgggattccttccgagacaagatccacgttgcgtagatcgcgaccatctaatccccaccgtttagcaatctcatctctagttcctcgaatttcagattgtttgacggagccatcgacatccaagaccatgccgcgtaactccgtcgcatcatttatgcggctttgcgacagagcaagagacaagttgaacacatcctgattgaaggagacttcttttttcatgtcaggctcccggatgacatgatgcgatttattggggagcgtgatgattccccgtttgcggtagccggccatgttctggatcttatgttgtttcatgcggagattgccggaaagatgatggaattggcgtggtgtatttgtacattttgacaatctttctcttggaacaaaggataaaaaagtccttggagcacatcgatgcatgatatatataccgtctttgccggttgccagtgtgaacggaattgtgtccttgggcaattgtcgatgcactaatcgggttatgtgacttggcgactcgcgtggcttatcatgaggttacgtagttacgtagtaggtcatgggcgaaatggatatatggcgagggcaagtatcattgattatcattgatagtgtgatctaagagagcgaatgctatgacctgaggttcccccctagtggaagaacgttcatccggcaattcggatgatctgcctcatggctatgcttgtagctgactacgctggtctttgtactagagaagccactaaaccaaagccgtgattgaagaacgaatacgaagaaatacgccacattttaagctggtggaatgataggggaaaccttccaaaaataggagatatttttggaaaccaaaatacctttcacaactcatgcacgattctgcagcttctgcagcttctgcagcttctgcgtgattctcttggggtcaatacttcttcacaattgtgtcgatatagttgatattcttgtctccaaatgactgcggcggcttctagttgggacacgagtcgttgacaaagccgctgtatgaaacgccctcggatatagtccggcggagccaattgtgaggaggagcgagccatccgtcggtggataaaatgcggaggcatgagaattttaaagaatggatcaaaagatgtaggtacacgaccgagatactgtacggattagctgggactgatctggaatctcggcattggtattgatgtcggcatccaaaagataggttgcgaaggccgtaagcacagcgggtgtattggccacggtatagttgcttatcttgtagtatatatcgatgccagtgttagtgctgaggtcacatttacgattcctgggtggttgaacgatgatctggcgtcctcgggtccacggtcggccaaatgctgagtcacccaccaattcaaccgtccgctaaacacgctgacgatagcagggtagcttgttacaggcaagggaaacttcagtatgactacgtcaatgcttcccttctatcatccattgtgctcttcaagttggcgacaccaatccactctgacacccatcatgggcaatatcatctagccgaaagtcgatcccctccctgtctacggacatgacctgacgggtaagctcatcgtcattaccggtgccagcgctggaatggatctcgaaacgaccaaatagctgctgcgactgtgcgcctcgattatgattctcgccgtccgcaatgttgccaggggtgaggcctacgcaacttttctccgccaggaccgccgcattcaaacataacccgggggcgatcatgaaggtcatagttcttgatatcgatgattttgacagcgaataacggctcacgaagtagctccgcgagaggtttcggtagtctatatcctcgttcttaatgcggctatcggtctacccaagctggaacgcagcgcgagcgaccataaccgaaccactcaagtcaattactacgccaaagtttgtttactgccgggctaatgccgaatctagaggggagtgcagagaagacaggctcttctgtgcgtattgcctgggtcggcaatcgcgcgcacgaggccataagcctggataagaaacctcctaccaagcccgatgaaggtctacttgcgcatatggacagcgaagatgcctgcatcccgttccagcgctatggggacttgaagcaaccttgcgcgacattcatatacagtttagcgccgcggctggaccccaaggaagtcattatcaacatgacgtgcccgggaatggtgaataccaacatgcgcgacgttctccccctacatatgcgcttgattgtgaatcttgtcatgtccttccgcgccaagcctatcctgcatagtgcatcctgcatagtgcactggtggcgggccccaagtcacatggcaagttcttgaacgacaagaccatatctgagttggtaataggctttgtcgttccatgtcaatctcgttttaatgaaagctatcatctgattggaatgttgcagggtgaggaaattgcgttattgatatgctcgtatgcgtgcttatccacgtgagctctcgctcaatggccgtgcctcgtggtgcagcagcacagtctctaaataggagaatgccaattcctactctgtaagctcgcgagagatctggatagctggtggcatcatactttggagttagggatgaagcaggcctatcggagttgctcgtagaactgacatatatttaatggcgaggatcacgcatcgagatcagaaattatggcatgggaagtccatatctaagccgagtcagttcccttcatcattgtactcggtgaagtcgctgtccgggctgcgccgtcaatattaattatgtaatcatgtagatgtccgatgtacaaggcacaaacggtagaccacgtgactagacgtgagtctcgaatctacgttgtgatgtcattttgcctttacccgtactccgtacggagtacagagacggcgattatgctttgattgggtcaattaatatctgaagatctcaagcagaacaagcaatgaatcacattgggcaaagcttggcttggtttatcgatcagcatctctcggacataatccctcaattaccggaaagagtatctccgagacccggatattctgtatcgagtaagcagctcaagacttacatttacgtcaaataagccttcgtgtcaccgtttcaaaggccgtctgtcgattgacaactgttacagagacgcataacacatacgttcggagacattgtggtatacccagataatctggaaaggcacatctccgacaaggcagcaacgtctcacccatgtctagcgccgtcgcaaggacttcctgcgacgaacaaaggaaaatcaatccgaaatcacagtcccttggcaaccctgaaaatggaaaatcatcaagacaacctctctccagatcatgacgaggttgaaaattctcgcgctccacagcgccgccgccgaccgcccctgtcttgcacggtctgccgcaagcgcaaattaaaatgtgaccgctctctgccctgcgggcaatgcgtgcgctcgaagacaacagcccaatgcgtctttatcggagctcagccagatccgacatctgatcagcgacgcatgtcgcccccgcaattaccacacggtggcgtagaagaccaggccggccggaaaagcggaatgttcgtctttgactcgaagttggggccgaattcgacttcaaatcgcgtttcaaagcgtgctcgttccgatgagctacatgagctccggagtcgtctgcgtgttttagaaaattcgctcggcaagtcgtctcatcttcagacgcctgagacctcggtttgtgatatattttctgaagtagatacggccaatagttctgagaatgttggtgttgatgaccgcgtacgattcttgccagattcaagtttccgcgggaagaagaccaagactcggtatttcggtcgcagtcattataccaccactgtttcctttgtgagtatcctttattgcgttgtttggttgatttgctaattagatgtagttcaaagatattggtacctttatgcgccgtggtcgttgccgcggaggagcaaaggataaagagtacactgatatgaaacagttcaagaccgagctttggtcgcgtgagatacaagaacatcagcgcgactttcgcgagcagcctttcatgcttaatgaactggttccccggcgaaacgttgcagaccgtctgcttcagctttatctcgacacttttgagaccacgtatcgaatcttgcacataccaaccttcttgagacagtacgctgattactgggccaacacccagccaaccgacatggccttcgtcgctcaattactcgctgtgatggctgcaggcagttgcttctatgtcccatctccaggtcaagaggaccgagacatattccaaaaaccggccatgaagtggatcatggctgttcagtcatatatctcgtgcacatttctgagcccagaaatcgacttccgaatgctccagacacagactcttcttttagtagctcgcctgggagtcgccagtgatgcggatgtagcctgggcctcagccgggtcgttgattcggtctgcgacgataatgggtctgcatcgcgatccggctcgtttccacaaggccaggccattctactctgaactgcgccgtcgtctttggacaactatcgtcgagctggatctcaagttctccctcgaccgcggggctccaccctcggttgatctagacgaatgcgactgcgatccaccgtccaattgggacgatgcggacttgataccagacatggaggataatccagctccgctcagtactgccctttatacccaaagcttctaccaaaccctcctcgctaagaccctcccactacgataccgaatcgcgaagaaaattaatagcctccgatttaatctatcatacgacgatgccctgcgaatgggtgatgaactctcccgctccatgcaacatgcatcctcccttttcgaagataattccccgagtattgctctgggagaatcaggacgtcaccgattcgcccaatccctacatctcttcatcgtgcgcaaattccttctcgccctccatcgccccttctcgcttagtgtcgtacgcctacccaaatgctcctattcccgcaaaatctgcctcgaagaatccctcggcattctctctcagatggaactcccccttgcgacagagaacatcatttacccgaacattactcaactgggaagcggtatgttccgtgatgaaaccttccacgccgcaatcaccgcctgtgtggagctgtcccttcaagccaatgaaatgagtatgtctactacatccgggatggatggtgtcaactccagcgtgctcatgagcatgatccagtcccaacagggcgtgatgctccaggctgtcgagcgcaccgctgataatttcgggagacgcattggccccggtgggacggggtgcaagcctttcttctttttgaatatcatccttgcttcggtcaaatcgcgcgtcaagggggaggatcctttgtgtaatgttgatacggcctcgaagaggtccgttcgcatctgcagggcgatcttgaatggtcttacctacgaggaagctaagattagtgttgataattgccccgctcaggttggtatctccacttatagctgtctgtctgccacacctaaccttcctgttcagacttctattccttcggggacgaatcctgccccagctacaccacgtgatattgaccctacgtcgcttctatcgaacgactttggtgacttcacggtaagttggcgctccttggatgctgtttggggctctgctgacctttttcagccaacggatctaggaggctggtttgatggattagattacactggcccagagttgtgggattgggatgccgacttgtctggaaaccttccaacattctcatgacttatggagctactccctaatattaatgactgatgcccggtgatattgcttctgttcaatgtcattctcaaactctactctcatctagtcaaagaatgactttcgtcacagtaaattgttagaataataaatatgcatatccttttggcttccaggaaagagataaaaattgcaggaagaagattaacaatcccacttcctcaagacaccacaccccggaagatatagagaagtatcaacagaaatgagatgctcaatattctcttaagtgaactctgtccgatataacaaaggtgaagataacattagtaaaaggaatggaagccttttcctcaaatacaaatctcattctgacgagctctcttaaaagacttaattagaaatacaagaaaacatctaaacatctaactaaaacatctaaaacatctagaacctaactctatagaacgacaagccaatcaaaccctcaaagcctcacaacttctctatctctttccccatttcttgaccgcgaacaagcccgatcaacacaattcttcttcgaaatcgcaacataactctgaaccaatctatccaataacaaagattagcagaaatcccagatcaagtccagaagaagaaaactcacgcctgataccgctgaatgttctggatctccaaacccgctagagcccccaatgaatcctgcacatcctgcaccaaactcacacaccgtcccatactgaaatccgtcctgacaacaaccctcatcatccccattgtctcgcaatccgcagccatggtataagcaggcacaatccaccccttctcgcgcagtttacgcgcaagcgcccattcatccaagaagacgttttgcgccgaactcaacctgaacgccacgaccggtaggccatggccaccaccttcactcatgattatgaaccccatttcttgcagctggctggtgaggtagtcggctgttgccgtgagatttctcatgatgcttgtgtacccacttcggcccagtcggatgagttggtagtactgtgcgatgatatgggatgctggtttggagaagttcattgtgaagttcacttgctcggcacctaggtagtcgatgttgaaaactagctccgcgggaaggtactctggtgatcgccagagggcccagccgataccggggtagacctgtggaaattagcatattgagtttattagagttggacgatcaagggatacttaccagtccgtacttatgcccagagacattgatcgagacgacgttgggtaatttgaaatcccatactagatccgggttcacaaacggggccacgaatccaccgctggcggcatccacgtggatgggtgtgtccagtcctctctcaaggagaagttcactgatagctcgtacatcttcgtactgccccgtgtatgtcgtgccgagaatcgcgcagatcccaatggtgttctcatcgaccatgtcgacggcttgaactgggtcaatcacgtatctcgtctcagtacatgggactagcttctcggtgatatcgaagtatctggttgccttttcccagcatacttgtacgccgctactcatgatgatgtttgggttggaggcatctttcccctgggtttggcggttgatttgccagcgcttcttcatcgctagaattgcaagcatgatggcttcggaagatccaatacatgatgtgccaaaggcggttggagttccgtcagaaaccggggaatggaataggtcggcgaggatgttcagacagcggtgttcgatatcgacagatttggggtattcttcgtgatcgatgatattcttgttcgaggattcggcgagtagtttgagagcttcgtcttcctgttacagtgttagtatgcgtcaaaaatatgacgagaagctgaaataccatgtatgtggtcacaaaactggcgaggctatattgagcaataacgttagttgagttttcaaaattttgacaaatagactcacttcaagattggctgaccatccagggccaagtcatctttgatcagctggtaggccacatctttcggcatcccttcatctggaagccgatgcgatggcataggtttggcaacgaaccgggagccatagacgtaagagcagtcgctcgtctggtcagaaagctgcttggataattcctcgatagaacccattatgtaatgaaaaatgtagattcaaattggaatactgataaactagcaagacgttcttgactttatattatttctcgcaagtcaattgttgcgtactggaaaaatatctcatagcgaaatcgtgtgatagggttatgaggcatttacacgagatatcatgatcaaagctatagtcaaaaggaggtttgagcgccgtttcaagttgggttttgcgttcgtgtctgtagtttgaggtatatatacatgacaacgtgatgatcgaagcttatctatatctgagtattccatgtaagacaagccaagaccttctagaaaacatcagaatagactattaatacaacagtttaactaactccttgttacaaagtagaattgggagtgatccctgccatcccttgttctaaaattggaaacattctaaccctacggagtagattacggacagagctaatactggacaatgcaaataccaaacatgcgatttactccctttgccacatttataaatgaggcttagaagcatctttggcttcatggttaattagcccctgactcgcaagggaacgttcaaccttcccacctccgcgggtgcggcgggccgaaaataggggtggcgcagccacaatatgtagtgtttctcacatgcattatctcgtattattattacaggcagcaggatattgatttgtggagatgagacgataaggtcgtcaagctgatagtcctggagtggtatagttattctactgttttgactttacattcatatctattgtaggagtcgcgagcatatatcgtgttatccctatttgtcctaacattttgaaagtggaacttccaatatttattcgacgcagtttgacatgctaagcaattgctccctatatgtacggagtatatgacacgtaaacagagcacccccttgctccggggttcatgcaagtcgtggatgaggtcaacaagattaggctcagacacgaagaagggagcattcttcaataatggaatcgtcgtgtcggcattcgtgtgatttacaaaagcccgtatcgccattctgtatcctgttcataacatcagtttttcgcttgcgggaacaggatgctgcatccaattctggatgttagtagtgttaatgttatcctctcattatcgggtaagacttgaactggcatgtctaggatgttctctaattgatagttttaggaatatacgtcttggtcttcgggtttatcgctgtgaaaatcaagcaaagatggtatctcggtgaagcttgtatggtgtccctcaatctcactagatatcggtcgctgatattattcagtaccctctttcataatcggagctgtcctaggaccattcggtgcgaagttggtcaatgtcggccagtggggaggatacactgacagcggtagtggtgatattgcctatgtaggtcctctcgccacgaaagaaaacactaagctaattatactagggattgacccgagtcgtgattggcatcgctatggtcaaagtcggctatgagctaccaaaacgatacattcggcttcatctggtcgaactaaccatttgcctattgccattgatgacgatccagtggctgatgacgtcggcatgtatcaaattaatgatccctaatctatcgtttgtgtgttcatcttatcatatttgacatgagaacacactcccactaaccttgatgcagttgacttccctcatcatcggatcatgtgtcatatgtatcgaccccgttctctcacaggctatcgccaagggtcctttcgcagatcaatatgtccgacgacatcttcgtgaatttatttcagccgaggcaggtggaaatgatggactcggtttcccatttttgcttctctcaattgcccttcttcgttatgctgatgctccgggtatggagacagtaaaagttggtcctaggaaacagagtcgagattggattagtgagccgagtacgggtcggtttggtggagatgtcggccgagctttggcccattgggctgttgagggagtgctatatatgcttgtcatgggcgctgggtatggtgtgctggtcgggttcctgagccggaaagccttgaacttggcctcgaaaaggtatgcacatatatactatcagtttaacaaactagctattgacatgagcaggcgttggattgacaaggagagcttcttctcatatcctgttgcgatgggtgtaagttattcttgagaaagatttggagtttatgctaagaaggcttgcagttgtttatcgtcggtacctgcggctgctttggctccgacgaaactcttgcctgctttgttgccggctgtgcattgaactgggatgggtcttaccacttcgaagtcgaagagagacatgactctttcaactcaacaatcgaaaacattttgaacgttgggaccttcatcttcctcggcgctatcatgccatgggatcaacttcacatgtccagtcagaatggaatcactatcgctcgactattcgggctcggatttttgattctgttattccgtcggatcccagcgatcatgatgggatatcgattcatgcccaaagtctgcgataattggaaagaggccctgttcatggggtattttggcccaattggtatgctatccaaccaagatgttgagtttttatgttgaagtgcagtgcttaccggttttaggagttggcgctatctcctatgtcgagtatgcgcgacgattgttaccggaccctggagagagtgatacagagatcaacaacttgactgcagccatgataccgggtatgatatacttctacttcaagataatgtaaactgacctttgatttagtggtatattggcttgttttcttctctatcgtcattcacgggctctctatccccatcctgagctgcctttataagtggttcaaaatccctactatccgagactacccggtagaaatcattcttctgtccgaaaatgagcctgttcctaacaatagcgtggtgaatcgccgtaaccactctgttatattaaacaaccggttttcatgtaactcaaaccagcacccctattctgatcatggtgaggatcatggcgagggaacagacacgatggtattgcgtcgtcgcagtggggaagctagctacaggggctcgctagaaaggacattgacgaaaggttcgtcgagcgaactggagcagactgtatctgctagaaatgtagtctgagtggccgagaccggggattgtatattaagtgaatatcctttgacatccttatttggattttagcatgagatagacgcatttcctaccttgaaatgattgaatgatattgtcagcaggaactaattccaaggttaatcgaattgcattaactagattatctatttctcgctgggatgaatatgtcatggtattttaccctactccgtatatatatcccaacctaataaaaatgccaacgaacatgggacaaggccatgtgtgccatatttatgcgcctcttttataataaattgcctcctccatccctccttcccttccacatcaataatattgcctctttcacagcgaccgcaatcatcatctacatgttcctatcttcttacagcgggtcagggaagagtttctcatcacctaaactttaatttcgattcgaaactccgcagactttgaagaaaacaggtccttgtccgattcattacgaattgaacttaaggggtcgcttgatttccagggtggaccccttacaagcctgtaagaagatcgggaggcgatgatttcatgcctcggcccctcgaaactgacacggacataaaaaaggtcgaagggcaatagctcaaggatttcgattctacaaatctctgataatcaaaaatgtcgtgagtgcccatatacttccatgagggggaaacactccccagactaaccctcatagtgcctttgtaacaactctcgggctccgcgccgcccctggccaggcacctgcgaaccacgcatcagccttgctaatggcgaactggtttttcgcgtatattctgacgagcccccgcggcgcaaagatacgcctgggtcttgatcacaatgtcagcccgcgtgaggacttgactacgtacggtgaggcggccgtgcagtcgggaaagattacccgtcgcgcccttgacaagctcaagcgacagacgtcggcgcatgccaatgtgcaggagggatacactttgttcgttgcggcgagtatgtggaactcctttggcctttcctttttcgcacgatgaacttgcatcttgtaaaattgctgcactgtactgaccttgccctctagtgctcgtctccttatacgccggtctccccaatgaaactatcaataccgtcggtgcttggtattcggtttcccgggtcgcgtaccacctattctactgcaacattgaatcttactctttgagctttctgcgatcggcggcttggtggtccgggaacatcagctgtctttatgcgctggtgcaggccagcaagaagttgtagaatagacggaggcgctctttgatttctctgtaatccgataatacataagaacaatacaatgcaagtacatctattatccgagtacgaattgtcaaaacggacaacttactccacctaagactgggtgttgaggtcttggaagtcctccatgcctcgaaaaaccacaacacgattctcatgagaaccttgcatgacaaaaggttccgctgattggtggaagaacccaaccctccagtctccatccccagacgggggaatgaatcccggccacaacgatgaattgcacagtttcgaacaacaatgtccaagttcgcgtagtctcgtccgacactctctccgcatccccgcttgtgaatatccttggcgacccgaggagaaatgactccatttactattagcgacacccgcggacttgttctattgccgcattccataggccctgccgatccagcacgcggtggaattgttttgacaggcggagaaatctctttcctctgcccgtgccattctccggatattgctaatctggggaaaggcacaagctccattttgctatggccaatactccggggtattcttataaattagcaggacttccagcatgactctcctaccccggatcaaccgacagcagtatcaattgatttcattgaccttgtgataatgaagttcatcgctattggtgcggtcctgttcagcgcagttggtgcttttgcgacagaacgtattattaaaggcgcccagatcatcccggccaacgacaaattggggctgaagaagatcggtgcttacggacatcacaagcacgacgaccgtcggacagtgacaattcgatcatcgaagagtgacaccgacgacatttcatatgatttcctttggggtatcaaggctgccaatcatggcggtagacttctcttgcaaaaggggaagacgtatgtcattggcaaaaagcttgacctcagcttcttgaataatatcgaggtgcagctagagggcgaagtgaaggtacataaccctagtactgtgattgattgagccgctctgacatgaatagttcaccgatgatatcgactattggcaggcaaaccatttctactactcctttcaaaagtctatcactttctgggtctggggtggtcaggatatcaagatcttcggaaagggtattctcaatggcaatggtcaggagtggtacaatgccttttctggcctagaagttttggtgagcatgaaaagagtcgggaatgacttgtgctaatagataattcaggacccggacaataccttttaccgtcccattctctttgtgactgacaacgctacccgcgtgtccgttgagggtatcacccaactcaactctccctgttggaccaacttcttcgtccgcaccaaggacgtctctttcgacgatgtctttataaacgcgttttccactaacgcatctgtgggttgtgaatctggttatattatcaatcaattctaatccttccgcaggctttgcccaagaataccgacgggtttgactccttcaacgtggatggtctcagtgtgaccaacacccgcgtcgatatcggcgatgactgcttctcccctaagcctaacacaaccaacattttcgtgcagaacctgtggtgcaacaatacccacggcgttagcatgggaagtattggacagtactcgggagtcgaggacatcatcgagaatgcctgggttgagaatgttactctgttgaacggccaggtaagacctccgtatatcgattttatcggcgagcctaataggaatttaagaacggcgtccgtctcaaggcttgggctggaccggacatcggctttggtcgcattaacaacatcacgtacaaggacattcacatcgaaaacaccgacgcccctattgtgttggatcagtgctacttcgacgtcaacgccaccacgtgtgccgagtacccgtcatcagtcaatttcaccaacattaccttcgagaatatctatggcacttcgtcgggcaagaatggcaaggttatcggtgacttgacttgttcgcctaatgctgtgtgctcggggattcatctctctgatatcgatatcgtcagcccggctgggggtcccccggtcgtgacctgcgatggaattgatggagatattggcgtggaatgccagtcgagctcggcttagattgtgagtatgataatagtttgagagaagaatgatttgaaaatagtcaccaattgaaagttccgactggcacaaaattgaatagcagtctgtggtggcggggatgttgaatattgcttaacttgctcggaagagtagtccgaggagccgtagaggtgtatgtccgagaagagtagtcatctccgagataacatccatccaataacactcccacatcattaccagcaagttttctacggcagattgctcgtaactagtcgcttattctacactcgttctacatctattctgcacatagccacacgaagctttgaccactttttcgtctcaacatgaacggtcaaacagataggcagcaaatttggagagttgagactcctcgtgatctttcttccccagagaaaatagaggttgatatccgggcccgacatttctcaaaagccaaagcagaagagactcaaaaccaagccgtcaccctcaatgacaactcgtcatgatgagtaggaccgccctcatactgggctattctctctccacaccccacaccatcccacaatccgagtggtacaccggctgagactatatccaccccctgtctttagccaggatgtatcgtgccttgttgggaatggcctatgattcggtattctaggctcctacatgcaaacgcgtacagtacttgcaaatcactccaatccggggagatgcatccacactatcctcctttgccccacccccagattcccataaaggtggagtatggggaaaggatgggatacatagcagatgttacggggtatctgctataagaacgtgggcgtatagatactctgcttttttcccccttctcttcgtccgtgctattatattcccacagaccctggccttcatattcaacggagaaaatggataggaggcatcattatattaagggtgcaaatacccgtgaaggagatgagtctggaaagccatgtgcattctacgtcgaagacccagtcgctcatctatccgaggaacatcgccaatatcttctttcgaagcatggaacactcgatttggaacctatccctgacatgaccgataccgatccatacaattggccgcgatggagggtgagaggccataactcctgccatccattcacattttgaccatgtttctaacatttttccttgatagaaaaatttcaacttgaccctagtcgccttccacgctatgatggccacattcactgcctcgtcgatccaatctgcattcgaaaatatctccgaggacctcgacgtcagtatgcagcgaaccagctatcttgtctctctcttcatcgccgtgctaggcggcgcgcctctcttctggcgcccgctgtgtaatcgatatggtcgtcgccccatatttctgatttctttgatctgcagcttgattgggaatattggctgtgcgaagagtacttcctatgcaaccatgggtctctcccgtgctattactgccttcttcatcagccctgcagctgctatcggtagcgcagttgtcgcggagactttcttccggaaagatcgtgctcgctgcatgggtgggtggacgctaatggtgactctgggtgtgccttctgctccatttatctttggtttcgttgcttcgcgtgtgggttaccgttggatttactatatccttgcaattgtgagattccttaaccccaacctctaggatgtactcgtctaactattcattcactccgaacaggtcaacgcaacccaattcctcctctacttcttcttcggatcggaatcactttacgtccgcgggaatatccctaccaacaccgtcatcgccgccaagcagagtcttttcaaattccgccggatcgaccctacaccgttagaattctgggacttcttccaacctctaagctatgtgatgaaaccatgcgtggtcatcccagccgttgcctatgcaatgatcttcctttggggcagtgtcatgcttacaattgagatctcccagatctaccctgccaagttcggcctgaacacccagcaggtcggtctgcaattcctcggtattatcattgggtctgtgattggtgaacagataggcgggttcatttccgatcgctggatgctgatgcgtcagaagcggaccggagaaccatccccgccggaataccgtctttggttaagttatattggccatgctttgacgatctgtggtattgtcgttttcgctatcgaaatccgggactctggcggtgtatggaatatcgcccccgttattggcgctgctattgccgctggtggtaatcaaatcgttactaccgtggacattacttatgcggttgactgttaccgtgaggatgctgctagtgtgggtgtttttattactttggttcggcagacttggggtttcattggtcctttttggttccctgagatgtttgaggttgttggttgggctggtggcgctggtatcgccgttgctcttgtggttggtgtgagtgttattccgactgtcttggttcagtggagaggagcttcgtggcgttgattgatatggccgaggaaatataatttctctttttgtcaactaaatgagagaatgcagatgttttacgcagtagaagacggtgctatccacattttgatttacacaatagtattgggatttggatcatggagttctctgtattcgtggcacaacaggatatggaattgatactggtgtgtaatacgattccggtataatccttctactgaactcgaacccactgcatattaataccgccgagaaaaagtcccctttacccgtgagtagcttagcaatgactgccaattttctatctaatatttctcacttctgttcggcgctgcgtcgggaattgtgtataagttcattagcaattgccatattattatgtcgtagacggcttttagcacgatgcttactcccagactcccagtgcgctgaactgaatacttggaaagtgtgcgttggaggaaagatgccttggcaagggtgaatgcactcattgccgatatactgtcgccaattaccacgttcattcgaactgggttaagagagaaaagcctcggattcattcaatgctcatctttctatcggatatgccccgcagggatcagtcccggtttgcgtggccaatgccaaacctcggctcaatgaactgccattatttggatacacgctagtgtttcataattgccatagagaggggtgctcctgagggaactttggtccattccagtatctggtgacggaggcttcggccagtactagttagggctggggtcaggtgataatctacaacgcggggatgccaagagacatgtgaaaatacaatggtcaaacgaaatgaatgctgtgaaatgaagatgacataagtgtcgatctatcgtcgatccctgtggggaagtctatcgcagtggatttcctttagtgcggaaggtcgaaaatgtgaagcctcggttagaatgggatatcctaaatgtgctaaacgctgttgatgaactatataatccgggaatcacccctttaccctccgacataaaatatcccctcacatcatccaattcctcccaaacagcaacaatgtctacccttaacctcatcgccgattactcccaaatggttctatctcaccttccaggacccacccgacatctcttccgcaacccaacagcccaaaaggccgtcggaattctcgccgccctcaccttcctccgcgccacaaacgacttcttttcaagacgcaccctacaaaactggacttccaaccaaccatggatcccggcacgcgagctcatcctactaacgggtggctgcagcggaatcggcaagcaggtcatggaagacctcgcgcgcacaggcgtgcgcgtcatcatcctcgatattaatgagccaactttcacactgccggctaacgtcaccttctacaaggcgaatgtcagttcctcggcggatatcgcgaatgtcgcgagcacgatccgtgacaatcacggcgagcccacggtcttgattaataacgctggcgttggacacgagggggcaatcctcgatgaatccgaggagaatatccggcagactttcgaggtcaataccctctcccatttccttatggttaaggagttcttgccggctatggtgaaggcgaatcatggtcatgttgtcactattgctagtatggcgagcttcgtggctctcggtgagatggtggattattgttgcaccaaggccagtgcgcttgctttccatgagggactgcggcaggaattgaagtattggtataatgcgcccagtgtgcgcactaggtgagttattctcgggtatgtatctgtagattttgctaattattgctttagtattattcaccctgcgtgggtacgtacgcctatgatcaagatgctcacagacaacgaggcgcacttcagagagtctatcatgaccacccaggtcgtgtctgacgctatctgtaagcaaatcttgactcagactagtggccaggttcttctgcctgccagtaagtcggtggctactttggtgcgcgctatgccaacctggatgcaggagggtgtgcgcaatttcgcgtcgggttccttgaagaagatgtgtgttctgcagacagaggagaaggcccaggcgcagtagatattcagctttggaaatgactggagatgtgattatgtcaccattttgaattttatgtaactaactaggagatggataactatacgctatctcatcgagcgataatacattgatatataatattgaagttatttcaaaacgccgacggctcctatcttgatatttatgggctacagaagtcaccatcgagacacggaatatgtgtgtaaaacactctcactattccatgtgtacccaattcatgtatgtacagacagcgttccttcatacaatcacaccattaactcggccaaaaccgcctcaaccttcttcccctgctccgtctttgtaacatcgcccagctctaagtgataaatcggtgcaacatgacactcacgatacccaacaaacaattcaacattctcaaagccctccttgaactttgccgcgaagtcttgaatcagaggcaacatgatctcattcccgcctgcggtaatcaataccgagttcaccgggaacgccgtaaaccaatctgccggcgcagtcgataaatccgtgtaatagtcacgcttgccagcaccaatataggctgtcacccacggtcccgcaaccgccatcgtaatgatatcgccatcgctatagacctccatttccgggaattccttctcgagaagggtccacggtgcaatcatcactgcgccgccgaggtttccgcgaaaaggcaggggatcgatctctgcgtgtgggtgggccagatgagagagaactccaccaaccaggttgccgcctgcggagtcgccgcccaggaaaatcgtggacgggtcgcggtttggttgcgaaagaatgtatcgtaggcaattcacggcctgtcggagttgagtcgggtagactgcgattggcgccagcgtataggtcagactgaagacagcgacgcttttgcctaatgcttcaaggtcgtgaatgagctgcgcgtagaatttgaaataacccatgttggcggggagtccgaagccacctcctgaatgatggttagtggtggtcaattgaataggggtctttctttgctggctgtacacataccgtggatccagactaccacattgtcagcattcgaatcacccatccagtggcctaatgctccgtcgcccaagtctacggactcgggtagcccaccggtctccttggagtgttgctcatagatcttgtgggatggcggtaggatgtactgcatctgagtggcggtcagccgcgagctcgccttgcggaacagtgcatatcccaaatgcagggacaaagatttggcttggcgttcggtgcgtcgaaggcccgtcaagagagcatagacataggcaaccacgatggaagccacggctgggaggaagtccagtttctcttttatggagaggttgactttggttactttagtgacagacatgattggaatctcccgctcatgacttgaggccctaagtatattttagcccgtacaagtgtgaaagtgaagtgttgatcctctcgcaagcctaccccgtttaggaaggtgccgaggtttggaaaattcctcggtctccatatccttgagattagctgtatctcctacggagtagtatttttgcatctttagatctctagttctctatacccaggggtatcggggcatagatctacatatcgatatctgtgtagatctcacattcacatctcggagaacgatctgtgtaacttccaaggtcacttgtatatactaacttcaagaatcatcacgtcttacacgagataaacacgtacagagtaccactacgaatcccatgcaactccccgatctccccgtgtacattttaaggttttgcgtgttgtttaccccaaagtcgacggtgtcgatctgccgaataaaggattgtgaaaccgaggcatgtcaacttttttcttaaataacctcaatgctattcgcttttcagtaactgttcatttgatcccattcatccatcatgagtggactcgatgaaacaaacgaagctaggcacttcgatgtcatcatcgtcggcgcgggtatctccggcgtcaatgccgcctaccgcgtccaagaccaactccccggctacagctacaccatcctagaagctcgcgccgatctaggtggcacctgggatctctttaattatcctggtatccgttccgactccgaccttttcaccttcggcttccaattcaatccctggaccctcgataaccccatcgcagagggttctgccatcaagcagtacgtgcgcgataccgcgaccaaatttggcatcgacaaacacatcctctacaaccatcgtgtgtcatcggcagactggtcctccgataaaaacatctggtcgctcgccgtcgaccacaatgactccgaacacacatacaccgcccgctatgtcatctttggcacgggttactacaactacaaggatcccctgaaagctgacattcccggcctggacgccttccagggccaggtcatccacccacagttctggcccgaagacttgcagtataaggacaagacgatcgttatcatcggctcgggcgcgaccgccatcaccctcctccccaatctcgccgacgatgccgcccgtgtcacaatgctccagcgcagccctacctacatcctctccgtcccaaaccgctccagcaaccgatggctctcctacatcctctccaatgccctgtatctcaggttgcaacgcatgatctcgatctatacaacccgctatttcttcctcttctgccagcgcttcccgaatttctcccgctggttgctcaagttgaatgtgcgcaagcaactgcccagccatatcccctatgacccgcatttcaagcccaaatacaacccctgggaccaacgattgtgtgtttgtcccgatggggatctgttccgcagtctccggcagggcaaggcggatgtcaagaccgatactattcgagaggttacgaagaatggtattatcttgaattcgggtgagcagcttgaggcagatattattattactgctactggcttgcgattgcagattgtaggtggcgcggcgctgtctgtggacgggaagaagatcgacgtgggtggtaaatatctgtggaatggagtcatgctccaggatatgcctaatgccgctttcgttattgggtataccaatgcctcatggacactcggtgcggatgctacggcgcatttggtttgtcgcctgctcaaggagcttgagtcgcgaaagttggtcgctgctgttcctcggctgaaggagaaggatgcagctacgatccaggatcgtcctctcttgaacatcaaggcgacttatgtgtcgcttgctgatcgcattttacccagggctgcggaccgtggtccgtggcgcccgcgtgataactacttgagcgacttgaagttcgctcagagtggtgatattgagaccggaatggagttcgtgcaaggaccgaatctgcggttacgtccgaagatgtcgtgattgatgcatgtttatgatatgatacctacccatgcattatgattgaggttctttgattcagtgtaaatatggtgtttgatgaggctcagtaacaatatgttcattcctattcttcagctgcgcaatctcccttggtgtccgttggactatgcatgctgcactttcgcacagcgtcacccttatcaactaatgcctatgatgttgcatctatcggattcgcacatacactcatattcccaaaataccacccatgattaggattgggccacctcaaatctcgatccgaaccagcattccccaccttgctattgatcccttcaatatactccaccccgtcagtagtgacctgcaccccagtcttctgggtgatccagtattcgggcgaaggctggctccaatcaaagaatggcagattgagcggcactttcggtatggggtctgtagtatgtgtggctcggtatatgctgtttggcgcttgttggttgctgataaactcggccagcttcaaatttcctggtttagggcctccgaatgtccactggtggtttgtatgcgttagctggaatctacactgcttgcttgttttccaacttgacttacaatatccagactgaacccttttgttcgaagaacagtccccgctaacgccgcaatacctccacctagactgtgtcctacgacactcagcctatagctcggatacgcgttcattgcattgtgaagctgggatgttgcctgagccgctacggcgctccagtaagcccagaacccatgatgggctttgcatccggtgcacacgtcgctaaccgaggtgagagcgatatcgagatctgtgttgccatcgcttttggataccgttccgcggaatgttaggacgatcagtttccgcgtgtggtctagggcgatgtagcctgtcgggccgtgatcactgtggaatgtgtcgattacggttgtgttgtcggctgctacgagtggacagttgccatagtcgcaggtcaaactttggcctgtgtgattgatgttctggtcgcaggccgatagggtggcgaactgtgagaatagggtgaatctttctaatagctctgttgagattgctggtacatttgatcgtcagattggaatttggaaaatttgctttgtccatgtgaggcttaccccggcgagctagttgaacaggagatgcaatggatgtcacgctcaatgatagcagtgcaagaatcattgacccaaccatattggatgatacttcgcaagtacagccaatctatcaaaggcgcctgttcttttgatctctgggaaatgagcttatatttataggtttcttttcccaccgtcaacaacagcccacctatggaatgttgcctaatagagaaggagtaatggccgcaggattcaatcccacgatgcaccgtgatgactgtataacagctgagttattggcggcactaaccttgcacccggaggatgattcgattctagagctgagagaacaaatgattatatgccattgaaacgatcaaaattctataatatgatacatacattccactcgtacatatcctataaaccaaaacattcaaaatatgtcacacagtgggaacaactcacagcgtcctcaatatgcataccagatgagattttctcctttccttcttagcctgctcccctcttgtccattttaggcaaatacatgaatttgtgattggtatgttcttcagctggcatgttgcatatttgccatcaatagcacaactaccacatgtgggctcaaagtgggtaatttctcgaggctagatccttggcgaggtagggatcattcttcaataggtgaagatttacatgcaggactcctatatcgagaatcatgtgaagattactctgtagatgtctcacagtgatgcggcccgcagatcgtacgctaatgcatctacaaccgatagatcgtcggctccaccttgcatctcaatactactgtagtattcaggtggattcgcgcatgatatgagtttgatccaccccgacctccagcatggtaaagacgaaccctcctagtacagatcgcctagggcatgtaagagaaggaattgtgactggacactgcaacgtcaagaaagggaagaggccttggatgctgggcatcttttcgttcatgtatgttgcatcatagccatattgctccgtataatgtttccgtataatcttccagcaagaaatagaatttgactttcggaaaagatttaaggttaaaccacagcggggttgatttcatcaattcaaccagggaacagtacaacctaacattccgggatgatgtaactcgatgacaccatttgatatgtcatgatttgaggagtagctaactataaggcgttgacttagccagtcgctttctcgttttactttcactacaccacactacaccaccaatttaaatccctcagctgtctcgatgccccccaaagagaaatataccgatcccgaactcagggatgaaatcaaaaaagaagtccacaatagcgacaaaggtgggaaaccaggacaatggtctgcacgaaaggtatccaacacgattacactcccattacgtatagtctctaacacacatgcaggcacaaatgatggcatcggaatataaaaagcgcggtggcggttacaataccacaaaggaagaaggccagacggagtctcagaaacacctcgataattggacaaaagaggagtggcagacgaaggagggatcaggtacggcgcgacaggatgatgattcgcgtaaacggtacctgcctaagaaggcgtgggagaatctgagcgaaaaggaaaaggacgagacagacgagaagaaggttgaggagtcacagggtgggaagcagtttgttagcaacaccgcgaaggcaaaggaggcgagacggagggccagttctgatgttgaggatgagagttagagggagattcgaagaaaaccgacgacgagaaaggtggggcgagaaccaaacacaatgcgaagcaggatgcaacaccaaaacagaaacaggatgcaaagtctacagaagataaagcaattcctcaactaagctcggttggctcctctaaatgcgcatttggtcgatgctattgacgaaacaggagcgagaaatccaaagggtaaatagcaaagtcccaagtaagaaagacttacgaatgaacgaaattgattcaatgaaatatcatttcaattgggatccatggtcttgaagctatacttgttttatgttcatatttggccaatcacgccaggatattaatcccaaatcatccatatataccattacatcatcttgacatatctcttcgatacaaaaataatcttttcacttacgttcctcatccacaaccgtgtggggagtgaattcgctatctggcaacatgttcatgctgtcctcctctgcgtccaatttgtaattggtggcccagaatccaataccgcccacgaaggcgaggatggcaaccacggtgtagttccaagtcaagagaggatcctcagccagaccaatgaaagcctgaccaatagcagacgagaacgcgttcatcaggagggacacggcctgcacgagggatcgcatgttctttggggccttggtgtaggcatactcaagagaagtcacggatgcaaggatctcagaaataccacccatgatgtaggtcagggcctggacccaaacggagatgttggtgtattcgtgtttcacctccaggcagtagttggcctcgttaccgcagggtcccagcttgtagatgtagtattgggtgactgcggcaacgaccatactgagggaggccacgatgaaaccagccgtgatacgcttcaagggggtgaagttgaaccccatcttgcgcagacaagggtaaacgagctggtcgaagatgggaatgaagatgatcagcgaaatagggttgaggttgttgatgatgtcgttgggcactcctccaagtttcatggtggccgcttgagacgtcaggttgttcatcatctggttataggcgagccctaaagatggtcagcttgtgtgaatatagtagataagaagtgtccacgtacagtaaagggggtaccacaaaaacactctgcaggcgagcagtcctcgtcgaacttcatcaacccacgcatcatcaaagtccatccacgcgggcttgttagccccgaagttgctgggcttggcggcggcccacatatcggtatcagagctccggaacctacaaggaatcaaggtcagtaggtgtaacattcggagctgacaggatgcggcttaccatcgcacggggttcagggtccagtggcccttcattgccaatttccacaccttgaaagctttggggtagattgaaccactgggaggagtgaggatatattgcttcttgcatatgattaacaccgcagggcagacgcagaacatggcagtggggagaaggtaagagagccagaaaccaacatatcgctcggcgtagaccatggcgacctgacccacaaaagaaccgatgttgatcatcatgtagaagtacaggtagatacgggaaacggtggcggacgggtcaacgatgacacgctcaccggtagcaagtgtcgtgacatagggtttgtcttcgcgatattgttcggcgatcaggggggagatgttggacttgaaaccacccgttcctacacccatgataataagaccaattgaaaagcatgcaatggctccattggggcttgcaatcacgttgggaatggcggaaatgatgagaatggtgtgtccaagaagtgcgcaggcaatcgcggacaggatggtacggtaacgaccccaatattgatcagccaccatggcaccgaagaggggcataacgtaggaccagaacgagttgactgtgcaggtcacacatattagcaatgaactgaactctcgagaccacattacttacacaatgtcaatccggtcgaggcctgttggcccattcccagagctccgggtgaatcattgctccagttggaaacacctggaacgagggcaccggtggtggatcccgtgggcaaaggtcgctgaatgaaattgacgactaattcaagttagccatttatcccctctctctaagattggtagtccatacaaacagcagtggtaccgtagtacgagaaacgttcgcacagttccacaaaggcaacactgtatgctgccatgggtagtttgccggcaacacggcgcaaagtggctagttcctcatctgtaggagaggttttatccagggaataatcgccttcgattgacgcatctcgcagaggaggggcactgtcgatggtcaactcatcaactacagggcccttctcgttgataccgatagtgtgtgagactgccttggacttagcaacctcagccacatcgacaggatcgctggcattcatcgtggcggtttggggatccagatatagagtgaaacacacagaaaagaaagaaggagaaacctgcggcagggcgaggtgaagcacttatatggcccatggcgtgattagcataacggtttagctcgaggtctccaagcgtctcattcacgttccccccttctaggcattctagaatcccggagcaatagctgcattgggagatggcggacggtaaaaaccgtcaatagccggaagagaccctgcgtcgaggacttttcttagattacgcctgtcaggacgatgggtggctctcacgctgagattcggcctcatccggtctgagcgcctgggacgataagcaaagtccggcttttgttggaaagcgcaagagatcccggaagcctaatggacgccagaacttggatcagccaatcaccgagccggtcaggggctttgaccccccggctttgggatccacttggtactacccgttggacctagcgcaaacctagtttgtcttggcatggggcttggcacggcttggccgagtatctccccgcttggctggcaacttccattgtaaccctgtagtcttggctattccatctgccctatcacaagcaagacacggctgataaccgaggtgacatagctgatatccgagatatcgttgtccaagattgatatcgcctggtctgggacccaatcatacttatgtacggagtacctaggcaggaaagcaacatggcgaaaatgcggggcttgtgttgattaggctcaaggtgaaattgccactactttccccctggagaagtgagacatggtgtgattggccccatgttatggcaacatcaattacccgactcttttacaaactgctttcgcgcattgcctcttggaccgtctcttgggccgtctcttgggccgtcggtgtccgagaaccctatgaacctcatgactatcgagctgactacctgtttaattgttggaaactattggtctttctcgctgggcttacgcgatgcagtcttttgattgccctgccactttctcagcccgcgcatcgtcagatattctagggataatggcatgtctctttcaccaccgtgtaataagttgtaatatccgaaatcgctagagtcttgcaaagatccagtgtgttatccgtcagaacccttgtatttgatgtgaacgggcgatcacccggccgatctcaccacgtacatggtgtctagtcgtacggtggagtgttactcgcactcgaactgcacgggtaactccttgatcattggggcgttcatctggctccttgctcacttccactttcgtaccctcaaactcatgaaccccatgtttggcagatatgttcaccgcttcgtgggtggcgggcgacattccaaccttgcccgcttactctgcattgaccactactacctcggtgttcgtgcgtgttccactggcagttgattggacgataatatcactccggcggtacaaatgtctgcgtctgctgaactgcacgtagccaagttatcttggcctgccttgttttgagcccatatccatccccgtcgcgtgaccatatacctgcgtccttgcattgtcagattgtattcaaatgtctgctttggggaggctaaaatcgaaggcagcatggataacccggtaaagcatcttagaattttctttgaactgctaacccctgtttatcgcattggactaactgaacatgggggcattgtgtaaacaaaggtcggctctagttgcgatatacctcggtttaccgagatctatatcatcattttcatttttttcattttttttttttttttatatataatatatctcaatatctccccctgcgcctattttggatccttcatcgaatctctcgagctgacaacgatctagtcgaccaaaacccctgtcgatgctaaactcgaggacggccattgcccgccatgtctgtgaaacaaccgagaaagcccttccccccaacaatcgtatcacctcccaggaagacttcctccccatcttcggaactgtactcctgtctcgctgagcaatcatcccaggggtaccatagccgctggccaactgagaaatcctccatcgcctcttctcttacatactttcttgtgagatcccgacaaagtgccctcagtcagcacaatttctcggtactacctcgaatcacatcaactcatttacgagggagaaatatcggaaggaagcccgatcgctctgatcacgagatcccagccccgctccgataccagttcgcctcgacgaccccgtccaaatatcactcgaagcaccacgatcatcaagatgctaactagtcccatccctgatcgcaaagatgcctcttgaataggggcttctacaccgaacaatgagccttgtatcactctaactaagacctccacgatcgcacctttcttaggtccacgctgatgactttggtatataacttcttagacaattagatcaagttggtctcatcatcccaccccaatcgcaccggcattccttccgataaatcggcttcggaagggaactacatcttatctgaccaaaaccaaggtcctgattctcttcgagatgggaccgacaaccctgataaaggccaagatccttcccttgatcccaacccaactccgaaaggcaatcacacacttccttcccagaaagaacctagattagattactagactagggctgatcccaccccgatcgcgccgacggacactgcatcttttttaaacagtcacaccgatggaccgtagcctcttagaaatctagaagattctaccctcattccagtctagatccctaaatctctgacgagtttccactgggataatccccctcttatccatcagttagaggcggtatcatcccgtccagcgacgtaacatgtcctcggttgtgtttgcatacggaactaactctgataagtgctatgtattgccctagtccgtctgatatctacttgttctggcatcagcatataggtgctcgaaaagaaactgataattccccacttgcaaagccatcgacacaatggaattgttcgatcatagcaacccgacgagaatgccacctctgtcttaccttgagtcgaccatgagcggtatgttcgtgtatatatatctctaatagggacgtatcgatgaatgtgatgttcgattttactggaagagaatgactttccgtggtccgacgaacagttcataatgcaagctatgaagaactccactggtgggttgaatagtaaacaaagcgaggcgaaagttccttcgactcgaaaaataatctcaaatgtcatgatgcaattcagcctttcagccactctttagttcgtcacctgtcggttaacccccttctatttggaccgatcagagacaccatcttaggtctcgaatacacgggtaatgaattacgctttcaaatttatcaacggggtaaatcactacctcgataatcccgatatccaattcatctactttgactccgagaatgcggaaaaggtcaagcatctcagcgggtgcctttcgccgcactttcgattgtatcactcagtcaaaaaaatcacgagtggttttcctgctgaatgtgaaggcgtaattaatctgccttagtcgcgagaatcctttcagacgttgtggcaagagaaggaggggctggtaattgaatctagattccatgagaaccatcctttcaatgtattgcagggcaattcgattgtcattgccgacgaagatgggcatactttgccaattcttcttttccattggcaggatggcgaaagtcttcatctgaaaaaacaacggcttgcccaacaagctgaatcttttatatatccttgacacgaacttccagtcttgaagatggcgaatttggctttggttccatcgccatgaccagttattcacagtgggacgcatgaaatggtgctcgacagtccactcttcgtgcagcagtttccgcaaagataatggcctgtttaacatagatattgcacgcttcccctgagacttcatgcgtgttctcacgcaatactgtaaacagaaaggaatgtcgttgtttgaaaagaaaaaaactcataatcattcggagaacttcgtacgggagacgatccattttggcagtgagtgatagaactaatagaatcgggatacacataggccgcgcctatataagttcaataagcacatgtaatatgcacgtaatgacacctgagtttccgaaaaagccagtcattgactgcaagcgctcatcatgaatagttcacactgacctgaataatgcagtatattcgatatttgttggtcaacgtgaataaactcaatcttgcccaagaaacgagccgtcatgaccactcaggcacatcctcgtggctatgacgggattggggatgagcaacctatatgtatgatggatttctctcgatacatcgcaggtatgggggtttcctagggccacgttctcttttcatgtctctcatatcacgcagacctgctgatacagagtgtgatacagaagccatcaaaatgtcaaaaccaacctattgagttcatttggtgagagagctcttccaacctcatgtgccattggcctatttgcctagaaaagcagggtattcgaaaaagtacctttcaactcacacagtgtcatggtggaaaatggatatgccccgtaggcccggtcggaacattatttgtccgacgtgcattcctctcggcggccacctacaaatcttctggacagattgtactatccaagcactgctacacatggtatacatgagaaagattatttgcgcccattatcatcgcatggctagtgcactggccgatctgccgcttgaatttgcggctatgtttcttccactgcacctcagttgccagcagcacagagtgccgaaggtactatctttgctctatatcagaacaatttgacgactaccgatcgtatcctcgactatctacagaacctatttttcttcgacgcctcgcggcaacagcttacagatttcgtcgccacctaccaagataacgaagaagacggctcacccttccgcacaggattcgcttacaactggtacatataaacgactggccgccatcctgggcgatctttctttcaccctcatgcgccaggcgttcataaactacgcccccaaagcgaaacaagtcgtggtcatatctatcatcgtattatcatggtcttcccttcctagggacttttcacggatccgatattgtgcagatgttctatggggtcctaccaaactacggatccaaatctctacactcatactgcttgtcgtttgtctatgagcaggaccccaatgcaaaggctggagattatatgcattggccacaatggggtaataaccagtcgctgatgaattcttccatcgaccgtggtgccctcatgccggatgactttcatcaggatagttatgaacagatcatggcgatcctgccgcgttctatatgggaatacaagggagcacaagggaatatattaggagcttcacgaattatgtttatattatcctaggatctgatctgggatttggtctgcacggttgtgctcataaaatttaggcaagaattaatgacattcgcaaaattcagggatggatccatcgatctctaagcaaaatctgtgttcagaactaacgcccaattcagttccagctcgccgtcacagtggctgtacttccagaacacccattcggcaccgtataagaccgattatgatcgctttcccacgttgcagctgcagatccggctgtcttgaggaatttgtgctagatggtcattccgacgaggcgtgtgatacttgtacatctccatcagctgggtgccagatgaatacccgctccaacttgttgaccatgtgtaggaggatccggataacccggccttggaaagcactgtagtgaccggcgagctgcccgccttatttgtttgtggccatgaacaaagcgagacatgtgcgttggcgaagctcttaggtgaatcaacggagttagcagccagacccgatttataccttcgacttgtattaccgttatctcatctaggtcagcacaagacgagcttttgttcgcggtaatatacaccgatgtaagctttgcctagttcaaacccaatcggttaattagagcagacgaaaaagttccaaattcctttcagagcaccatggaagccaagaaacgtcgcgtccagctcacatgtaagccacctttcaccaaagtgctagttccgaggcagatctggcgggctggcgacggggataatttaacctggtgattggtggatatcagccaccaccccggattatgccgtaaaaataacaaggggcggagattcaacggaatcaaatattggtgaagttgattctaacgtggttgatctaagcgattgggatgaagatcaatggtcggacagtaagacctccatctgtctcggaagatattcgacccacctgaagagagcaatgatgggccggacatttgaagagttaacaatgaagccctcgagtagcgctgggattatattccaagctgacggtggtgtagcggggaattattggacctctgattgacggcatttctctcgccccggagctcattgtctctgaaacaatgtgctgtcatgcaagtcccacacaagtgcattgatctgccttggaattccaagtgcgttgaatccacttgcctgtccccgctataaaagcaggtgtcgcccccacaatcatcccaaaccaacttaccttctgacaccatgatggcttctcacttttgggctgctctttgggtgctcacacttggctacgctgttgtagttgcaccacagatattggtccctcgtgcgactggcagtctggacgcctggttggtgtctgagacagcagtggcaaaacagggtatcctcgataacattggatctgctggtgcctatgctgcgactgcaaagcctggcattgtagtcgccagcccgagtacctctgaccctgactgtaagtattggatagctatttgtggcagcggaaaactaacttaactggcctacagactactatacttggactcgtgactcggctctggtgttcaaaactctggtcgatatgttcaagaacggtgacagcggcttgttaaatattattgaagaatacatcgatgcacaggcctatatccagacggtatccaatccatctggagatctttctggtggcagtggattgggggagcctaagttcaacgtcgacgagacagccttcactgactcttggggtcgtcctcagcgtgatggaccggccttgcgagccactgcattggtctcgtttggccaatggctcattgtataaaccccgaatctgttggcttttgcattgctaacccatttaggataatgggtacaccacttacgcgaccaacattgtctggcccgttgtgcgcaacgatctctcctatgttgcccaatactggaatcagactggatttggttattacacctcaaattttagttgcgcacatttctaatgccctatagatctctgggaagaagtttctggctcatcgttctttactgtcgcagctcagcatcgcgccttggtggagggaagcacattcgcaagccaggttggttcctcgtgttcgtactgtgactctcaggctccacaggtcttgtgcttcttacagtctttctggactgggtcttatatcctggccaactttggtggtggccgctctggaaaagatgccaacacgctactcgccaccatccaaactttcgacccagaggccggatgcgatgacaccacattccagccttgctcagctagagcactcgcaaatcacaaagttgtgactgattcattccgggcgatctatcctgtcaactctggtattgctgcgggcaaggctgtttctgttggtcgatacccggaggacacatattacaatggtaacccttggtacctatgcacattggctgcggctgagcagttgtacgatgcgatatatacgtggaatcgtatcggttctttgacaatcacctctgtctctctcggcttcttccaggatctgtacagctccgctgcgaccggtacctactcctcgtccagtgatacatacacctcgattctgagcgctgtcacggcatatgcggatggatatctcagtaatgtggtatgttgcatgctatcgactattgaccacctcaactgacagatatcctaggaacaatacgctgcatcgaatggctccttgtttgagcaattctccaagtcagatggctcacaactctcggctcgtgacctgacttggtcctacgcagccctgcttactgccaatgaccgtcggaatgcgatagttcctgcaccatggggtgagacatctgccagcagtgtacctggccaatgccagtacacttcggatgttgggactttcagcagtgcaacaaacaccgcctggccgaccacgttgactagtagatcaggcagcggaactactaccactacgtctgcgaagacaacctcgactacagcaccatgcactactccaacagccgttgcagtgacattcaacgtgattgccactactgtatatggccagaacatcaagcttgctggatctatctccgagcttggctcctggtccccaagcagtgctattgcgctgagctcttctttgtacactacgagcaaccctttgtggtttgtgactgtgacacttccggtgggcactgggtttacctacaagtatatccaggtggcgagtgatggcactattacatgggagagtgacccgaacctgtcatacaccgttcccaccacgtgtggtaccacagctgtcacgattagtgatacctggaggtgataactgaagttttggatacctcaattgaagattgtgcatgctttattcttctatcgtcgtagaatagcaccatgataatgattgtttatctgagtattagctgtccgaacacaaccaccgcctgtccattgtgtaggcgctgccgtttgaactattacctgatcgggctaaccttaccgataggctggtacggtgatgcggccgtcacatcataattatatcaaagtagtgaataaatcgccgcaggatgtaatgacggagggatgatgtgtgaggactccatataagatcaaattgagagccgatgaaacctgaaatcaagttctttattgtcacttcgttaaaaacgtcttagtcaaaccaacatgtcgacaacagaggaaagagtgaacgagatgcgtgggtacaaggcgtaagtactcacttttgtgatactcatgagcatatctaattagcaagtttatctttcatagcacgctgagcaacccgagagtttcagaacgggcaaagcagcatgcacacgacaggcttaatgagcttggcggtgataagcctcgcgaggaactatttcaggcaagaggcgatcggaagaaagacccaacgagggtcgcagctgggtataaggcgtgagtataaataagtcttgggatgttcttcgcatatgctaattggcctatatagcgcgcagcacaatcctaacgtgactgaggccgggaagaagaaagctaccgaggagctacacgaaactgttccggaggagtagagaccttttggttggttttacctgatatgtgaaactaagtgtgaaagtatatgttggcgtcacaatattatatacgttccaatgttatagggcagtgatctgcacagaagagacgatgcgttactgtaggagactaacacactttgtagcaggcttatattgcatacagtagtgaagttccgatgaacaaaatctaaatttgatggcgcgtaataaacagcccgccgaatgacgccaaaagcgaaaagccaagggaaacaactatagcacgtcagtggaagataccaaacgcgttagaatccatcaactcacgatatgtatgcttaagtcccaaaacatagcaagccaccaccgtctcccgcagatggccacttaggtgcgcgatataatttgtatcagccatcgcacgttgaataacctagagcaattaacatcagaccaaatgagcttcgccaagaaagtgcgtaccttctccgagccaggtccgtggagattaagtctcaactgccgctggaactccatccctagaacagaattggacgtagttacacccgccgtcatggaaaatcccacaataagcatatatcccgccgtcgccatagcaatttcctcaactggcagcatggcagacatggcaataaacgatgaggccgatgcgattcccgtgccaagtccaccgggaagaataaatagtgactcccagaagccgctgtgtccatcccagcggaggtaaaggagcaggtaggaaatggcggcaactagaccgccgatgacgagcagaattttgaattgtcccgtgcgccgaatgaatatgcccgctactaatccgccgagagtatttcctatcactgctggaatgagatgcacgcccgccattgtggtcgatgcgcgctgtgtcacttgaaaatatagtgggacagagaacatcattcccagctgcgcggagatctgaagagcgccgattatgtatgccaatgatacgttcgtacgccggagaatacggagattgaagatcggttcgggggctacgtaggcttccacgagcacaaaggtgatcaggagtaatgcccccccgcctgctaggaggactgtccaccatgagctccacgggaaggacttcccgccctggtcgaggagtgtggtcattgcgataatggatgagcctagcagcgcggttccgaggaaatcgacctgggcgagtttgttcactttggtggagtttgctttctcaccgacgttcagtttaacaaccacgagagctgcagccagagcgaggaacggagcttgtaggatgaacaacctgggatgtggtcagaaaatacatacagctatcggataagtggaaactcaccatctccatccgatggtatcgctcagccaaccacccaacggacctcccagactacgtccaagcgtcatggcaatgttcacatatgctctccaagtagcgacctcgcgctttggaacaatatctgtgatgataatggagctgatggtcatgattccggcaccgcccattccgctgatcgcgcgaccgaaaaccaccacccacattcgggttccgataccgctatacatgatcagatttgcatttcggctgttgggtcaggattttgcctacctcaatatacagccaactgcaaataacagatatgagagcagcaacattggcttgcgaccgtagatgtcactcaattttccatactgggcgataatcagaccttgacatgtctccggtgctggtcacgcccactcaccattggctgtgcagcacaaagacccaacgtatagcccgttgagagccaactagcatcgcgcagacgattgaattcggaggagatccggcctgccgccgccatgacaagtgttgcatcggcattggaaacgaattcgcctattttcgattagctctccggtcttcgtatatcgccaattttcgtaccgagcagaagcactgcgataattgtcccaacacctgccaatgctttgagcttaggctctgtgttagatggcgggagtaatggactttcttcgtcttgggcatggctattggcatcaatgccttggggtcctatgacacccgaaggccccggctcgaccgtgtcgctttcgatatgggccatgttgggaattcaagagcgtcgaactagaaaatagcattgagggggtgtcacctgcggataaatattatgcaatgtttagctaagttgtgctcatcggagtgataaagcacgccatatataaggtccactacgcgtacttcacgaaagaatacatacgatgttttataaaatggatgtagtcttttatctagtcaacgtattccgtacgatcatggctggcgtgttaactcacccccagtcgaccccacaatgagaatcaagtggttagtgccccctcaaggataagaattgtcgagcttccggagaaggttgagaagattcccatacgcatgcggatgaactttgaaactaaattgattggaataaaccaatgctatcctattcttgctagatgactaccagactgcataattcagtccatcttctccgcgacatgcagtcgattacggtaagggacaagtaacgatccgaggaaccgatggtatcccgatcgagctagataccgtacttgctccaatcgagtgtttagaagaagagctgccagtgatatacgttgatgaagaaggagtggacgagatccttcaacgagtgatcgatgatccagaggatatcgaggagctctccgatcaggagggtttctaggagccccgatgtcccaccctcgatcggacggggcagacgttcgaaatatccgagggaccctcgcttgtcctgatacaagagaaaagttgcttctgcaaaatcaccagaacccaaattcctacagaagaccagagacatcgataagacaacacgaagatccatacaagaagggtgcgaaaaatcgaaaaatcatgaaaaggaagacattctcaaagaaacgctcgacctctgagcctccttcgccctcgccttcccattctgcctcggggcatagaacaagaggcccaaacaatcgctcatcacaatgcctatgacgacccaaatctcccatgtctgctgcactattcaagaaccatgacccgtactgtctcattttcaagaaaattatccttgtgcaagcgagaagggagcttgctcttcagccacctaaggtaggtggcatcacatgttgctatgttgatagatagcccaatgccatcctgagcgataacgaaatgactatattttatattgttagcatttctagcctaggccagttgatggtatatgagccccattgatcttgttggtttggatgttggtcgttccctgaaagtagacccatgcttgagggactcgggagaaaatggtcgtcggcggcatcttgactatagtggatccaattgtgttaataacagaaaatacagaggaatgcagggtaataatacctaacaagatagacagagaaagttagatggaagttggatagggaacttctcgaccgatggaagaaaatcaagcatagtgtagaagtgacaaatagtgcacgtcacccatcattccaggttttatcttcaagttaacttgtatgcttttatctctctctctctctcccccccagtagcctcaatataccctggtactatagttactctcacttcaagttcacttcatcaccaaccatcaaccatcaaccatcaaccaccatccaccatccaccacttcgaactccccgtcacagactctcttcggacctactcatccactaatttatggctactccaacatactggccacggagtagccaacaatcggagcaaaaacgaaacggacaagggacaatgaaatttgaagattggctagacaatcagacaagtgaacacccttatttgcctagttgaccattgaatgggttcgaacatgaaaggaatccctacaaccatagtggctgggtttctagcaatattaagagtatagtagtatgtgcactcatagtcgtagttgaaaagtgacgccgtattccataaaatatgacagtgcatattcatttgaacgtctcgacttattaaatttaacattatttcaagtagaggccttggggttcatactatcacacagaactgaataaaaaacatctcagcgacgacgcgagccttgcattttatccagctttgccagaattcccactgcacctacagccccatatccaccctccctccagcaggtctcgatgatatcccgggcccagatttgcttgcccagggcgggaagcatatcccgggatggaaacctggcgacagagtcatcactgccactgtggtgatagagactgacactagtccgtctcccagtggcaatctcgtagaacacgatgcctagctggcagagatccgtccatatggaacaattataatcatccaccgcatctgccaggacggcgtcgatgggcatgatactcgacgcaccaaggtcacaaattgcgacgttcaatgaaccatccagcaggatgttacggctgagaatatcactgtgaatgacgcaagattggtggaggttatgaaggccgatggcaagctggcgaaaccagcgcttctgaagctcgatgctgggtcgtgccctgtgccgcagccactttgacaacgtacctccggacatgtatctcatctctatggtatctccggggaggtcgaggcaatgaacgatcccttccactggggtattgaagtcgggctgaagacgccgccagacttcttgctctcgtcggatcttgcttcggttctgttccacttcctccagcgtattattcttgtacaccactgccattttgattgccacatcctctcgttggacaacaactgctgcatcgccggtcgcaagtattgtatgaggcttgatgtagtgaccctcatcgtcgatgaggtgatacagagccctcatttgggtgatgtgaaagcgatttgggggaattgctgccggtggtcaatgtcttcgatgggagtagaatttctggggaactgtttatttttgtttagatgatctagctagcaaatgattagttagttatgatgtataattctgtcagaaggagaggtcctacctgaagtcaatgtatgtatttggtcttgctttcgacgaatagccaaagtccagggactcgctctcagaggcccgcggagtgaattctctgatttgaagggaaggaccgtggaacctgcacagctgggatttgaccctgtgcgattgcttagactgggatcatggcctcttggggatgcttgaatagagagataaagtcaagaaaccgccaaaggatgtttggttgaaactggaattggtggtgctgatttgatggcgacaaagaatgaaagcgagatgaatgaaagggagatcaatgagagatggtgcctttgacaagatgaagtcgcagtccattcatcgccgtttcataaaaaagccatgttctcctttcctttttcagaaaggattgagggtgaactgcccaggcaaggcatattttgatgcttgaaactggacaagattgcactggaaacacatcgtagttgaacctggaaaatggtcagcgggaatcatcttaatacgtgaaatcgcaaagtattgaacaatattcaaattgaaccctgctcacttgatgtataataacatgtagttgtatcaagacgaggagagctttgctgccagtatatgtattcatagaggataaagaaaggataaagaaaggtagagcccctcaggtagagagtcaaagcaaacaggcaagcgatggatcgaggaccttggcagcaaaaagacagatgtataaattattactgctttccacttccttcatgatcacaatatgcatatatacagcgttggttgctgttctcatctattttaatctaactgcttctataaattgcctcaaaacgcccatcacttaaactgaacttggcgcacatattcatcacttattcataattgatcgattcactgctcgtgcgtgagaacatagcggtatcgagcatcaccattctccatatcgacgatggcctggttcgcatccgtcattgggcgctcctggatccaaggcttgacgcccttggcaacagccaactctagcatctcccggatctcactaggactgccgataaacgagccaccaagcttgaggcccttgctgatgagcagggatgccgggatctcaagagcgccatcctcggggactccgagctgaataaaggtgccgtggagacggagaagtccacagtactggacaataggcatcttggaagaggaagcagtggagatgatcaagtcgagagagctagcgttgcgggtatcccaatccttatcctcagcggtagcgatgaagtcatccgcaccgagctcgatcgcatcggccttcttatcggatttgcgggagatagcgacgacgcgatcagcaccgagtgccttggctaacataatagcaaagtgaccgagaccaccaataccaatgacaccaacggactttccggggccgcatccatttcgcttcagaggcgagtaggtagtaataccaccgcagagcataggtgccgcatcggcggaggagatgccatccgggatcttgataacgaagtgcgaaggagagcggttgtatgtggaatagccgccgtacgatgtcccaccgttggcataggtaccgttgtaagtcatgaccatattatcgcagtgttgttcgaggccattcgcacaaggcccacacttcccgtccttgttctcgcatgagccgctctgcgcgccaacaccgacacggtcaccgatcttgagatctccctcggcatgtgatccgacgcggacaactgttccgacgacttcgtggccgacacagcaagggtagttggtggcaccctgtgaaggccggtgttagcaactgtattcgatgcgaatatgttcaaaatgaatgtgccatacccatccatccgcccatccactgcgcagagtgtgcaaatccgagccacagataccacagtgagtgaccttgatatcgatatcattctcctcccatggcttcggctcgaattcctgccaaaccatctttccttcggcggcttcagggccaaggcctacccagccttcgaacttgtaatcggtggaagacataataaaaatgtctatttgggttcaacggtttctgaattcaatggatgagatcgacaaaccattcctacagggtcctccactatttaaaccacctacacggagagatcagggtccgtctcggagcgttattatgtggcgacgtggtcagcaagtgaagaaaaggtccactcgacccgtcgagtggattgttagtggattttcatgcgtgggttgtcaccacggtcttgaattatttgcgctatatccggcgaagagatttcatttgaacgcaaatatgttgtaaatccccggcagcgggagagggaaggtagagtgaggcataccgtagacaatatcacatcaaacctacacccgaggacgttttcccacccgtatatcctccatgtttaccttccctgaggagttgctgctttacttccaagtatgcatgacgtcagacataaacccactaagcccctggcttacgccgacttatacccgacaagcttatcttgtactggtcgggtccattaggtgcctagtttcagaaaagaatgaaaaatgcttttgattcgacatgattctgttttagtggagaatcttcgcaggttttcatagccaattctatcaagctttcgcatccactccatccgaaggaaccgctttttgccggcggaaataatattggacacaaaggacaagagcaatgacccatgaggcaccagcaagggagcaaattgcggtcagaccatgcaagtacttcggcgcgtcggaagtgcggaagatctgcgagccagaaataccagcacagttggcagccattatcaccaacgccatcgcaacacttcgttcctggggtgtccggcagtagaatgacagccaaccgacattcaaaatactaatgtctggtcagcttgggttatagacacgaggggtatggaactcactgcatgctgcagtaggaaatattagcgatagcaataacgccgtaccggtgccatagcgaagcgtgggtattacttgtacgaagacaagcataggaaattacattccaagtgatagctaggagcacaaagggtccacggtgtctcgttttgtctctgtcggcagttagaatccatctcgtggacataatggtcatattaagcactcacgcagcaagagacagagcaattagccagatcatgctgcagtagacaggaaccgaagctaaagcgttcgccttaacggcaccgaaacccagggctttgatcatgctgggtgtgtattgtgtcagaccagagaagccggacatggacaccaaagtcaggagaacgtgctgcatgattcgtggctgtttgactgtctgccagatatctgcgcccgaaatctggatatggcccttggctttgaggggatcatttagtagaacgcggttacgaatgatgtgcgactcgcgctcagtgaaataactccagcggccgaaggtgatcaaggcacggccgtctccggctgatggaggtacgaggagggtgaagacaattgcgatgaagagggtcattaagccctggactggatgattggtcagaagagctcgggctgtataagatcgatctacacttacccaggaagatccatctccacccctccatgccatgggtaccactcagctgaagcagaccggcggatatcaagctcgctgtagccgatgcgaacatctgcccgtagaagaagagactggtgcgaacgctcgtctcctccttcttataccaggtagagaggtagtatagggcacctgtgggttattagccgattatccagtgcgaagataacgattgccataccaggaataaaaccaccctcacagaatcccaacagaatcctggtaaccaggtacgcaggatatgattgaacaaaggcctggaacgtggcaaccaacccccaagcgaacaattgacccgacaaccagacgcgaggtccaattcgctgcataatgatattcgatgggatctcggagagaacgatgccagcggagagcagttgggatccgacattgatttgattcgttgtgatattgaggtcttttgtgatagtcgatgtcaaaacggcgcttatatttccgcgatccatttgcaaggcgaagaaagcagctgcaagaatgggaatgatgatgaagtcgattctgaaagacacttattagtgaaatgttcatagttggtatagggacaagaactatatgtacttccgtcgaacggccggttcttctccatcccaatcttttacaataccctggtcaagctcacttggagatgagtcgatgacctgctcccctattttgttcttctcgtcgaagatgccttgatctgccatcttgcaatttgaaggagcttaaacccccaaaaatgaacaaaactggaaatatgtgtggacgttcaattcctatggagggctttacaggaacactgttcttataggaaaaggagaagcacaagataaaggattgcgtaagtcaatttagttaaaatgtgctaaacagcaccaactccgtcgagtgcgttttgacgcgacgacttcttgatgtcgcgagatggggagatatggcgcaatcacggatttgggatttgccaaggatctggggatctgggggttattggcctctagatagtgatgtggacattgaataacaggaatacttgaatataattgattggcatcgttatctacaatgtaaaattagcaaattaactacttctttacacccacacatcccaagacaccccgtgtcgactagtcaacggcacctgtggcccctcagcttcaacaatgtatcccgcatcacaccagtcaaatgagacatggggctgtgcgctatagaagccatcatactcctcatttagagcatcctggagagtactaaccgggtctaccggttgaaggacatcccacggatggatgcaagtcacaccctggcatgacttgaggaccatcaatagagcgtcgagtcgattgatagcctgggtcaagttgcgaccgagaatgcgcggttcattgagatcctcctgggaggaagtcgggtacagattattcaactggtatggatcggtctgcaaaagggttagtcgttgtgataaagaaccaaggtactatctactcaccgacatatcatacagttcatgttcattgttgcaccagactgagtaatacagactgtatccgtctccatgtaagcggacggatttgtaggtgttatttgggatcagggttgagcctccgggacctgccttggaattagtacttatcccacaatggccatgaaaacgttggactgaccaatgccgctataaataccctcaacaacagcagaaccccaatactccactgtaacatgttcatggcgctcaccctcaaactcgggcgtcatgggaatagcggtaccatcgaaatcatccctcggcggtatacccgcaagatggaacaaagtcggcgccaagtccacatgcgtagtgacagcatcctgcacatatcctttagccacgccaggtccacggatgaacaagggaacgcggatatcctcctcaaacccgcaagtcttcccgggcggcagtctgtgctggccaatatggaacccattatcggaggtatagataatataagtattatctagctgaccactctgctccagccgggtgacaagcccatcaactaattcatcaacaccctgcagggcgcgcagacgtgaacgataaaagtgatcgttgtagtcgacgaccgattggttctgcaagggtaggtcgtgaacccagctgactccacttggctacgcaagcaaatcaaatccgtcagaatttgcgaacacaaacacgttaatttgaatcagggccgcgcttacctggtccggattgaaattcgccgtccggggcactgtgacaccctggaacaaatgctgatgtcgttcgagggggacgggcgcggacatgtaaaagtttcccgacgtgatatcgccaggatcgacattcgaatgtggcgcgacaggcgacactgctaggaagaagggcctctccccggccagtgcatcatcgaggaaacccagtgcttttcccgtgatcacatcgatggtatgttcaccctcgtggctgaccggtggttcatggtttcgctggtaagtcgaattgagataagaataggtgtaaggatcgagaaggaaatccgatccattgaatccattgatgtgtgggctgtcgtagttatacacggtatgtgcgttgaacattttcccggtgtaatacgtatcataacccgccccttggagccacagcgggaggaaatcatcgttgaagccacgctcaacgaatttgggatatccgccgtatggtggatggacatcggtcacatttgtattgtgtgcctggcgaccggtccatagactcacgcgcgacgggcagcatagggctgttgtaacaaaatggttgcggaaaaaggtgccctggtcgcggatgtgtttggagattaggggggtataggagattgagtcgagttgcaagtcttggtcgtcagtgatgacgaagaggatatttggcttgcgcaattgtccttcgttgggtttcagtaccgattggaggactgattgcaggttggattggaaattgagggctgcaacgccttcgacggcgacgaggccggcgatggcagtgattaatttcattgtgtttgagaaagatcgcggagtagtacaagttgtatttgtatgcaatttataaagaagctatccaatgtggagaaatgtggagataacgatgatgccataaatggccccaatggcgggagataaagtgaagttattcagagtcttcactttgtacaacatcggacagtttattttcacttctatacaatgcaggggctccttgatgcttttcccacctccgattgattttagccaagccggacaaggtgggaagtatctaaacactcgttcatactactccaagtgccatcaagacagcatttttgactgactatgtgtatgtaatataattgggaatagatacagtagcctgatcaaccatcgagaaaacagtgtagttattcagtcgtgaatggacagagggagaggctctatcccgtgtgatgccttgttaacaaggcatctagccaatttacatgtggctaatggtggctaaagtcacgtgtgtattagctggccaagaagcgccttacccgaagtagtttagaccgcgtaggataagcatagttaccaagaatatcagaggctggcttccaagtaggatcatcatgcttagttcaacctcttttcgcttagttgcatttcgggaatcattcaaatcaatcaaacccaatacattgtgcaatctacagttcccttccctcggatcaattccatgaatatgtgcaataaactcttgctagctacgggggaaattgttgagctatgggccctgggtattgcgagatagaatttcaatatgtctacaattagtttgcttgtgccttgagcacctcgttctttgtgttcattttctctaggtgtagtacccatgattaccgccattcacatcagtttgaagtagtatcctcgttcatattacattagtagtagtgcattctgtatttagtacagacccgacacactaatataaatctagatgatattttatgatacgaaagggcccgtgttagattggaggataggtcaacttgaagatagaactttaaataacatataacttcagaggctaagagttatctaagatttatgtgaaagttatgtgagtgtcaatggtgtaagaagtacaaggttgtagttcaggtacactctcctgtatgattgcttttctttcatcagtatataagtcctctcctacatatccgacgagatattattcctctccatttctccgctgtatctgttagtcgatcatccccatatctaggtccagccctaaatatctgacagggcaagaaactaacaatatcagattcagagaaggttgggcgggtggccaactctaatatatcgagtaaggtgaccagaatatctgagtatggcatgttggatcaacggttagaaatccggaccttaggctcgaaaaactggagacaagagaggtggttagtcttgtggttcacttgtcactatgacgtgctagtagttgtgaggtgccaggtcgatcttggagagggaggagtgcattcaactaaatgactgagatgaagaaagatgaagcaagttgcaaagcagagaacataattatctttctacgcatgttcacgaccgcagtgaatattgtgtcgtcgaattgtattgttcgctagattgctaagcgagaaggttcgaagtttgcaacgtttgcaaagggtaagctatatcaaaaggctgtctggggccgtgataataatgccctgtactacgaagggtcgctttcactgtaaaaacaaaatgtcaatattcatagtattcaaatgacaagcttcacttttaatatatacgcaacgctatgccgaatgtacatccaaatcaaagagaaaagctactttgacagccaaagcggcttcataatagaccgcaaataaaccagtaaaaagaccagcaagtagttcgtaacggtaaaagcaagaaagataccgaaatacggccagatcttggaagaatccagaccaattccagacaaatactgccaacgcagattagcatctattccggataagacaaaacatattccaggaaacaaactcacatcatcaccaaagctatattcacaatatccacattcgcccattccatccgggttggagagatacccaacacctttcgcatcaagccatgggcccgcgtactcactgcaagtagtgttgggtggactctcgaagatagtcaattcagtctgagagcaaacgacagcagtaccacggagaacggaggtgagcaccccaccaatccagtacgtgaacggtgtgatgtaatacattgtatatttccaaaaggcaggcatctgagattgcggacggaggataccgttgaagagctcacacatgataatgaagaagggcatgagggtagcggcgatcattgagtcggcgctatcgattggcaggatgtgttagttgattaagtcactgcggacaagaaacggtgcttggttatattaaactcacctcagagcggcaatccactgaccccacgaggtcgcaaataggaagaaaaggaagaacatcaggaaacagtagccggctgcgaagccgagtggtaatcccaccataaaatagtataggacgaagaagacgacggcacccagaacggaataggggatctcggagatgatctgcgctgtgcagaatgctacccagccgtatacaccactcgggccttctcttgctaaccagatatcgcggttcatgatgaagcgcatagatatagcgttgataaactcgggaaccagcatcaggacaaggaagcaagagaacgcctttgactggaggtccgtcgtactattgccgatctggaggtaggtgaggccgttgataagagcgtggaggaaggaagagtaaagacgcgagtatgggtactcggcggtgcgccaaaactggcgacaggtccgttgagtgaggagtatgatctgctggctgagagggggtagggttgggggcagggaagggggacgggtattcttgtcggagcgaattgaagcgatctcgttcttgacctcggcgaattcttctgagttgcgccagatggctgcccaattcgtagggtttcccgaggctttcatgccgccgacgactacttcgatgaggaaatcggctgcgttggtgactttttccggaatgttgccgtgtcttgcgaaatactcgaagattgcgtggccagattcaccgactgggccaaagtagtatgtgcttccgccagggctcagggctaagacgcggtcaaactggtcttgttaatattgattcgtaagaagggtgtttaatgcttacctcttcgaattgctgctgattagcctgatggatagtgcagaggaccgccagtccctggttggcgagacgtcgtagcagagcgacgatactagttgcgccctggctgtcgagtccacttgtcggttcatctaagaaaagaagcaagtttggccgagcgcacagctccactccaatagtgacccgctttttcttttcaatgtccaaagacccgatcactgcatcttgtaattcaaccaagtccaatgtgtgaatcaccgtttccacgtatgccagcttttccgccgttggaacttcgtggctttgtcgtagcagggcagagaactcgaaagcttccttgatcgtgctgctttcgtcgtggatgtccatttgctggcaatatccgatctgtcggttgaaggactggtcaattgaccggttgtccacgaatagagacccggacaagatgccgggactctctctttgagtgagtgcagtcaacactaaaggttgtcagaaatcaagcgatggattcatttcattgtgatcttacatgtagacttgcctgctcccgaggcaccaacgagagcagtcaaagaccctggtttgcagtatccacaaaccccatccaaaatcttcctggtctccttgccaatctgcacattcagctccaagtcagaccaggagaaagtagactcggtagctgtaagagtctggtcatgctttgtttcatgaccaacaggtggcgctgcagaatcaatcgagacaggcgattcctcttcatcagacttaactttcttctcccgcttggacagcttccgcgagcccttgtattggatagggccagcactatccagctcccactcaagcacctcactcagccaacaggtcatcccaataaaggcgactgtgaaaagacagagaatcccgaaattacgccagacgttgctgtagtagaatccatatctcgcagccaagtagtcatcgccattcacgacagtgctgccaatttgactaccagcataggcacaggtctgatatgcgaggtcggtatattccgaaccggatgggataatggaggctgccgcgcaggggaagttaacattgtggaattcggcggccatgactgcttcataggtatacagagcaggagttgtatatgcaatccatccaacccaaggaacatcttgaatcattttgtcgacggagagaacgtagccgccaaacacgatgcaaaacataacagaaaccccacagtagcgaagagcaacttcaaagttctgcgatagagcggcaaagacacggaattgcgccgtgaggcaaagcgtactcgtgtaaatgaagaggccgtcgatgaagaagggaccggcctggaagagtcagcgtctatactgtgccaagattccgagattactcacatcagaccgtagaccggacaggaagtacatgacaatcaaatacaaaaaagtcaaaagcacagttatcaccatatctgagagcactcgggccagacatacagcgctgggccgcacgaaggcgaatttcttctgtcggctcaggatatcgcgaccctgcatagcttcttccaactccgacatctgcagccaggcaagcaaaatagaagagtagaagagcacacctccacgtgaatacataccctcggtagtctgaggctgatcgtagaacatagacccaatcaacaacccatagaccacgcaagaaattaatttgatgtatagcgggcccatatgccctttcaactgccacatctgacgcttggcgcaaagaacgacctgtcggaagagcgaaatcgtatatggcgacttagacgagacaaagcgcgacttgtcattttgcacagtcttcttgaatacctccacgctgtcgcactccgaatccgccggatacgcactggaagacctaccggacttctgatcttcgtatctttcgacggccgtctcgatgttagcgaacgcagcactctggcgaaaagcggcttcgagttcaatggggcccttcggcgcacggttttcccatccggcacggaagcgccgtctttcgggcagggtgatactggtcaggaaatccgaagtagtctgcatatcagcgcactcatagcccagatcttcgaagtaacgcttcgcctcgtttgcaggcccttggtacagcatgcggccttcatcaatgagcagcaccttatccaccagctcgtagatggcatccgaggcctggtataaagtaagcaaggttgctttgccacatgtatcggtcataatacgcagactgcgtgcataatcgagtgcagaggatgcgtccaatcctctcgtggaattatcccaacatgctactgatgaatcggtagcgagagattcaatgatagagatacgcttgcgttctcctccagacactccgcggatatactcattccccaccaacgtgttcatggtatgtgacatgccaaaaacccgcccatagatctccaggtaccggggaatcctctcccggtagcgtttgggagtcttgctctgcagtgcaaactcgagcgtttgacgcacggtcagggtggggaaatgcacatcgtcctcggggatgtaggccacggcgccacggtagtgcttcctaacttcatccgagctgagaccggagtaatcgattgagcccgtgacacccagaaaggaagagtggtggccagcgatagttcgcagaaaggtcgaacagccggcaccaggacggcccagaacgctatatatttcaattagaccaagttcggtaaggatgagatggcgtttgatttcctgcttacagcatgatctctccgctctgcacgactccggaaaaatcgcgtatcagcggacgcccatgctcgggcatcttcttcacgatccatggctggatcgtccattcatagacatcctgtagggtgagggtccgccacagggctgtggcgaaggtctttacatctgcgtgggagtctccgtcgccccatgttgagagggattgaaaacagacgccgaggttggcaggtttcttgccctggacttgttcctcgaggaacttgtcgaaggaggagtgcggttccgggtacttgggatccgggtggctttgagcggttaatgtgtgatgaatatcggcgagggcatcttcgtcctcgtatgagacctgcactctcggcggttcattgttgtgtttctccttggcaaaggaagagctatgcttcaagtggggatgaagaggagcgggcatattgatccttcgatggtcgttcggaaaatccagacctcattgtactatacatgaagaaattgcacaatcttataaagaataagaccaagaataagaatttaattcaatcaagaaaaaaaggtacgaccacatgtcccgaaaaagaagccaaggctcatgatgatgaacctggatacgaccagccaatccggtggtcgatgagaaagtcaagatgttgctgatggggtccaggcgttatctgaccatctcggtatacagccaatgacagtggcaaggtgggtgcaacgaaaggcggttcgttcttttcaccaattctggcgaaggccttgaatataatacaagcggagtccgcggccaccgcgcgattgttttgcagaaaagggaagccaaggcgagaaggatccaccgaaccattcgagagccaccgaggaacattggaaatgaggattttctattaaccgtatattctggcatattatgtagacgagcctagttaggtctatgtatactctctgatcgagatatagtatcttccagtctcgagtaatttcacaggggcattgtatcatgtcaacccccacactttcctgcagaatgacatttacaccggagaatttctcacgtggcgggcttactaatatatgcacttctgcctcaggtgtcgaggtccttatctaattcccaatccggtctagcgccaccgagctccaagttccccgtctccaaactccatattctccccctcactaccccaaaatgcaaactctctacaacgctctaatccgcacccatcacataacctcccgcaaaaaagtagccgcgctcaaacgagccgcagacacacaccaatgcgccgtactcctgcgctccggcgggtgtccggggatcatgtacgtggagggcggaaaggagccggtggagagctgggtggatgttgtgcgccggttacgatataaggattttcaattggttacgcgacccggcgttgtggaggaggaggatggatatggaactgggaatggaaacaatgagaagagaaatgagagagagttggatctcccgttgggactggatgaggtagagagtgtcaaggagtttggaggcattatggcgaggaggggggtatggaattggtggaggagaggcatggggtatgcttaatgtcttcatgtggatttgcattcatgtactgctttctgagatatccagttgaatttttggtttctaatacagtgatcgtcgttgattcatgtcttcccttgaaagaaatatatcccaaacgccataatctacctatactacatatgtatacaattaatcaaggtgcgtttttcactcaaaccggcgccggataactgagcagcttgcagatatcctacgacagttagcaacgagccaatattcccccatgactaaacatacctttcgttgtctccgatacttatcatatatcatcttccagatctctcgatcccgacacccactctcctgcggcgtgccaggattgttatcacacttcggctgctcagccgccaacatgtcctgcgaccacataatccacggcttcggcagcggccaatcggaaaagtgcacaaacttagcctgcgccaggacatgatcagggtcccagacctcatcatcattccccaggaacttgcgatgatccttcgtccggaactcgccgctcaatagcccatactgccgatgtgggaggaccattgctgagtccccatatcgccgattcaacagctccatatcataccgatggtccgtcaggtttatatcgacttgaccgttctgggtgggtgcggtaacgtcggtcaatgcaagatattcgcggagggagggctcaatgacgaccatcagtgacgagagcagtttgtccggaagaagccagtaagcacgtggcatggcgacagtggtaggcgggaggaagaagagctcgtccattgtctggaggaggataacgtcggagtcgagatggatgacacggtcgtattcgtgctcgccgaaggccatgagcttggctgtgctagtatcccacgaagccctggaatcggagtctataaagcgagtgacatgtcagtgggtatcttcaagaagctagaatcggttccaacagcggcagccgaactcactggatccatcctgaactccctcgatcttgatcgggatcagcattacattatacttgagtttcgcctcaagcagcaactggctgacgcggtcaaactcatcctcgacaatgaggtcccactcctctgggtaaaacaagacacgttccgccctactgccgagtctgtgcaaagcctcgaagaccatcaggcaattgcacatgtagacctcattggttgcatactgagtataggcaaagcgcgaccagtcgacttcgtcgtagtggatatgtggtaggggcagcggcggggggcgttcacgccgttgccacagaataaacaggacgatcagggcgactgtggcccatgttcggacgcgtcgtagctggcgcttggctatggagagacagggttcatcggggatatcgaagaagtcatcctccgaggcattggagctccgtcgataggggagggcgtaatttttgggcggcattgttagaggctgaagctattgacagcgcagtggtgatttggatagatgcacgtgatggttatgtaatcgttattgtgaatgcattctgatgctaaattggatttgatatcgaaggctgagaccagcttgcaggcttgagattgaacattcaaagttgcggggagggcccacctcttttcaaagttggagcaaccgtggaagatcgcatgccttccaaggttgtatatactactctgtacaaactattttctattttctccatctgtccaggcatgacatacaaccacttcgtatacattactggtggtgatgagatcctcaatcgttggtagcatggagtaacagttccagtttataaccttctagtcgggtgtttgcctacgatggtactcgaacgaatttctttattctaatcatattaaccagcagcttggagtgacggagaaaaaggtccattggtgataactcgaaaaaaagcgaagtcaccgcgatttccgcaaaaagacaaaaatagtttccctgggaatcgaacccagaacctttccggaacatttgcgaatcgcatttgttaacggaaaatcataaccgctagaccaggaaactgctcgaccacttgggccaattgatgaatgggcaggcgaaaaatggcattatgtctaatctttgaggtataacgtacgaacagtatatttttgtctctaatctcatgtatatcggtcgcattttaatttcatttctcctactgtgcctattctctgtcagtttcagtcactatataacccagcttaattggggactgccatatacaccgagttagttgttcattgagcaacttgtatggtagtccacgctagatatatatagaacgcataaataaagcagctgccacattcaactctccgctctttctcgtttgccactaaggagggacgtagtaggagaaaataattataatccaagtgcttattatataccagagatctatataccgtaaatcaatgaaatcccccaaaatgagattcacccccattaggcaacaacctcgtcccacccgaagagatcgacctcccatcatcaacttgaacaacaatatctgtcttaatagtaacacatccatcatcatgatggtccggcatctccgccttcgaaatctgactgacagagcgctcatgcccatgtccattccagtgatcctcctcatccttaatataagtattggtcatattagtcactgtagccgaatccagccactggtcctgaacattaacgcggcgcttcatctctgtgtctggctcattatgtgcggttgaccgagagcgagaccagtagccgtgataccggccctcgcgtctgtggtcaatgaaggaccggaggaagaggcgggctactggggcacaggaggcgaggaggatgctgtagttctcaatcctgggagtgttggttaataatactgggattgggagatggtagttgtacttactttacccagagaacgaacgtcacgatattataggtgaagtcttgtctgtcaccaagcgatttgagtttctagtgaatgatattagcgctgctgtgtaagtcgagaaaagatattatactcacataggtctttacaatagaagcacagccagagagcaagagtggtccactgagcgtgatggtctgccagatccggcgggatcgaacggtgccattaattttgcggaattgagaccagaatgaggtgtttggattacggtggagggttcgcaggaagaattgccagagttcgactgcagcaagcacggcaaggaagaaatcgatcacggtgttgaatcctgtgcgaattgcaattagctttgagctgagctgctgaagtatataattttccatacctccttgtacaaagcctacagtcgtttggacaaccggtgattggcacttgacggaaccatcttcagggagtggtgtccacatatagtgaaagtattgtactcgatcagtctgctctgagattagaatggaccaagcactaagaaggaggatactaaccgtttgatacgggttcggtccgcactggacaataatctggacgattgtaaccatattgacgacaacctgaacaacggcgcagacgataatagattgtcgaatcttcttgtcgctggctgcaaagcaagtcaaaagaaaccacatcatgcctgcgcgtgacaccattgccgaagtgacagccatcggctgtgaaagaaagtcccatttcatagcataaagacgctcttccccagttaagtagaagaaatgtctcccaaggcccgagttggcactagacagagttaatggctgacctgggaggaatgacactagtcgacctcacctcatttgaataagtaccatatgagtgatatcaaaaccccaagccacgaggaagaataagtcctctgtaccccaaattcgaccaggtgcagtgacctgcggtaaagcccaacgcacccagatcttgatagcatagcggaacaacaatgctacgccgacaatggatgtgaggacctgctcgaggattagtatacatatatccagaggcaatttataagatcaagatcatacccagcaagcctgaaatgtgccggttcctgttaaacatgtcaatccacgatcctctaggtccatttgcttggcatttgccaggtaaacataccgatatcaacatcgccctcactaggtttcggaatatccataatgaagataaaacacaataaccagacctctcggttataggcagggatccaattcaaatactcattggcatatatacgagacgagaacgatgcgcggggtcggtcagatggatcaaatgcgaaagaatataaaccaaatccaatccagcaccaagggatagtagaggagagcttttaagttgcctttaaaggttattagaaatggagatcctgtcaaaagtctcgcgcgaaccggtttacaggtcagaaacttgtctagactcgtttccaacgggtggaagggcgcataaacgtaaaatgatcgagaggaaacaagggatgcagggcaaatcccttgatttacaatgaaaatataatcgggtcaagcgaagcgagttgtatgatatggcagagtattgaaccttgatgtacggggtcagaaacgtccagttttgacttatgacaggagttaagctcgtgtggccaatctgcgtgtcagaaaatatcccatccttttgatcgtggcaatggacacttcgcattgccaggaccatgtggatcaagcacaggcgacattccggagagggatggaaatcatgcaatggccatgtgagatgcagtaagggatgtgacggagaatgagaaaaagaaatacatcaaatacacatccacatgggattgatggattcgatacacccctagatcggatctgcaaagatctgctgagttcgagagataaaaactatatgcacgtaagcgaaactattgattgaagggatgtgatgagtatacatcaagaaatgatatatcatattgacaaagaacgattaacaatgaactagtatcaacaaccaaccattaaccaattgaattaaccagtgaattatatcgctcaaccctgaactaccgatccgccctcctcatctccaccaatgactctccagccctaacataaacctcaaaagtcacctctagcccacacaatcccgccacctgcctccactccaccgaactcctttctcgccccccatacatcgcaatcatactcgcatgaagcgcagtataagtcaaattcttggcgtactcaataatcaaaactcgcgaaccaggtgtcatagcacgcgaaatcttctgcagcaacgctacagcatccaaatcaggcaaattatgcaagatatgttgcagcgcgtaaacacacgcaccccgaacgggctgctcagcctcatttttgtaattccactccataagacgcacaccaggcacatcatcgatatccgcattgaactcctgcacgattagatcatccacaccgagatgcggatatacggcctgaacctcaaggaggagttcgccacgaccgccgccgatgtcgaccatagtagcggagccagcgagggtgccagtggtagtgtcacctgccaaagcaccatctagatcatagcccatcgatttgacgcgctcggggaatgttccgaacttcaggaacttgccgaccatgaaatggttgaaactatccatgcgaccctgagcctccataattgagtacgtgtgctgctttgccagctcagactgacccattagctgataggcgtattgcaaggggccgtctgcttcagcaaaagggtatgcgaattgggtgtctcggagctttttcatcaaaaatgcgccggccattagaccctcggtggtgctggatggggttagtgcgtgcttggctggttatattgatctcattatagaaacaggacatgcatgggggaactgacaagtgcagtgcgccatgctgggcggaaggcatggcgaccatgtggtttgtgatggcatttgctgtgaagcagtcctcggccacgcgttcaactaggccgagtccggccataatgtagagtgtgtccgctgcaggaatgcattagcatatcattgggatactgcttgtacctatacctgtacaagggtgtgcttacaggctaatctggtacctatatccattgtcagcataacatctacaacagccatgataacaagccattatccattcaaactgaaacacgtactcagctcgggttcatctccccctcgggctttgatgcgtgcattgcaggtagccgagacttcgtcggccgtcgcaggtcccccgtgacccacgaggatattgaagagatcaaagtgaatcgcgaccgggacaaatcccaacgatgcaggctgtaactgaattagatagaagaattatctgacagattcatcagactcactactgtgacggttgctgcgagtgcggcgcctgggggtgcaacgggggccgaagatgacaagcccagtaggctggccaagcgggtgaggaaggacattgcgttcgtgaagatttttgagtatgagaatgacgggggaagtatattctgattatactctaaatacatcatctacaagtacaacatacggtgggatccggcagcaattccgatactagggtgagaatacaaacggtgtatatattcaatttaccatgcctggaatactacagattataacacatcaactcctgattcgttattatcatgggattgttgcgctccgtggaagatcattggttcaatgtgaccaagttgggtatgcgcaagggataccacaccaatactccgtaggaacaaagaactaaagcctagaaaataaacccgcgaataggaatgtccaatagcgaattaccctaaggcgaaggatctactagccccgatctagctttatgatacatccactacacgtacggagtacattccggagacttttcaacatatccaaatctgaaaccgattagggttcccctctgatgtctctgaattgataaagactagattctagaatctccctgtgcaaaaaaagccacgcgagaatctccatgtgtattcgaaaaacccgccgtgcataaaacctacggtgtcccgtcacgcagaaaagaaaaagatcttcatttacctccttacctgaccaaagtacgttgtcttggggttgagcttttacactgcacagaatacaggcaccaagaagtgcgagcatacctaccatggagaaaccctcccctgtttactttacgcaggagatggcagctagtgcgtcgtcgtcgcttgagacacatgaactggaggaatgcgatttcgattcggacctcgaggtcaaggatcccttgaacccgagaaattggtcatcggcgcggaagaccatgctctttgtgtcgctgatgacgagctcgttgttggcagatgggtaagtatacccggtcgattgtgaaacccatcgcggctaccggctgagatgtgtatgcataataactttctgactaaatcttgcagggctatggtatggggtggaaccctggtcacggagcaggccatggattggaatattaccatcgctcattcggcgactagtatgaattatggcatcctgctgcaggggtttggcggaatttttgctgttccgctcattgaggcgtatgggcggtgagttgggtctttttcgcccacgttggctgtcacactgacagctgaatgtagtttgccgatctggctgtggcctcaggtgatcactatgtttatggtgctgggtgccaccctctccaatgattggtctaccttcacgaccttccgctctttgcagggtctatttggcacagtgcctcaggtaattgggctcccgatcattcatgatatgtatacctcggctggtaagtattttctgtgggattgtctcgagtaccttatgctgatctgacaacagaatggccgcggatgatcaatatttggtaggagacttgccactcaaatttagggtagcactgacttgagcataggggcaccgccttcctcgtcgggccattccttggtcctgcgatagctggatacattggtgccgggtcagactggcgtatttccttcggggtcctgacagccatctatggcctgtccactgtcatggtgattctcttcggctatgagacatattacaagcctggacgaatgaacaatcagtcacgactcgcgtcttattttggcattggaaataccctgcttcccaaggtatcgacgttgatatattggagccgaacagtcgtggtctatgtgttcaagttcccgttgctgatgactggtgcgtatggtcgacctagcttgctatgacattcactaaccaagcctttgtcgataggaatcgctatcttggtaacattcacttggccgattggtaagtaaccaccatcacaccgttctttcacctgctgactgtgcaggaatcacaaccaccatcgatagcttcctgcacagccctccatatttgtttgacacgatcgaggcatcatcaatgcgattcgccggtgtgattggagctttatgtggtatgcatcttcaaagcacctctctctctctctctctctccggattcttaccatctcacaggctgggcatttggccacttcttcaacggctggatcttcaagcgtcatagctcaaactggcgaaccgagctccgcctccacggtgtctggttcccgataggtagtatggcaagcggtctcctcacctacggactaaccatgcactttggcaagcactggattgggatagccattgggtggatcatggtgaacatcggcatggtagccacggttgtgtaagttccaaatccactctcctgagtactgtcgtatgtctaacatccattgctcagtgccatctcggcctatacattggaaaaatacccggagcaggcgacctgtgtctcggccattctgaatatgtggcgcacctgcggcgggttcgcagtgggatacttccaacctgcatggattcagcgcgatggcctcggactggtctttggcattcaggctgctattctgtgtgtggctgttgctttgactatcactcctgtgttgttgtgggagcggaaaaggcggctgcgagttgatgctgaagctgatccttgaattctaatggtgtaaataactgtatatgtgtgatgataggattgcatttggaatattttgtatttatttttgctcagacaatagaatacgagttgtgcaataaggatagttgatcaagagggacctcgcgtccaaccctgaaacacacgtgactggtgcctaatccatcaggccacaatcccgttgccgacccgaacacgtccgtgccgtgtccgtcgacgccagtttcatgcttaatctattcaacgccatggctggctgctgtactccctactacagattaattgacatcaatctcaaacttgagacatgatttacccctgatcttcagctcctgaatctttcccactaaccaacactcctactctgtacggggtatacacagtcgatcattgcctcgctatgcaaagtcccgcaagcgatgacgcttcccgtggggcagcggtctgaaagacgccaccgtttatttggcttatgtgccgcgtggttgctgatcagtccccaatgaacctgttgcttggcctatcaaagatccctcgttcacctcgttcagaggttcaaccatttctgcctgcctatggattatccactgttgccgaggcagtgtcaaactcgtttgactcagggactcagggacagcgatccctgaccctttttttcccttccgtgctgtgaaacatttgttacaaccttttctgtcttttcccaccttattctcgttagctaaatgacatcggttcctatttaatctttagattgtccttgagcaccaacccgactatgtctagttctccgcgacgatggctcttcgtggtctttccgatccttatattctgcatcatatactacctctttcgattgcctgaatccaacccgacaatcgtgaacaacccagaacaaattcctcaagcgggaggagaaacaattgtggtaggggaggggacaagtcctcctctaatttcccctcctaaagaggagacagtggaggagaaatgtggccatttactacacgcactcgacgatgtcatggtcatcatcaaaaccggtgcgaccgaatcccttgaaaaggtccccatccacctccgcaccacgctgaaatgcgtcccgcactttgccatattctccgactacgaagaaactatcgatggtgtccgcacgtatgacgtcctccgcaacatcagcgaggcaacaatgaataatgaacccgaattcggcatctaccgccgtcttcaagaggtcggacgtgaaggcttgacggacgcagaatggggcgacgacacaaacggcccactaggcaaggtcaataacccaggatggaagctcgataaatggaagttcctcccaatgatcgacaatgcactagaagtcatgcccgatgccaagtggtacgtcttcctcgaagccgacacctacatggtgtggccgaacctgatcggctggctggcacacctcaacccagatcgacattactacctaggaagccccatgcaaatcggcgaaacactcttcggctacggcggggcgggcattgtcctctcacgctggacgatgagcctcctgcacgaataccagatgcgggcaaaggaagatctcgaagcgatgacggcacacgagtgggctggcgactgcgcgctggcgcgagcgctccacgacgtgcacgtcgatctggtttgggcctggccgatgatgatgacgtcacggccgtgggaaatcgaccatttctccgagggatacgggcggcaaccgtggtgttaccctgctatctcataccaccacatggcgcccaaggatatcgagaagatgtgggagtttgaccaggcgttctttgctagtgggaagaacgcgctcatgctgcatgcagacgtttaccagaaacttgtctacgatgggacttgctcggcgcgcgacgattgggacaacctctcagggatcaagattgattttgcagctggcacgattcctacgttggatgcttgtgcagaggtctgtgggcacaacaacgactgcttacagtattcgtttaatcacgccgagggtgtttgtaaacacgcgtctactacctttgcgggtgttgctaccaatggcacgcagtctggttggattacacctcgtgtgaacaaactcctcaaggcattccagtcttcatgcaatgaggtgcaatatgtattggattgatttttctttcgttcctcgggcattttatttttcgttgtctgtacattatcaacttccttttctttccccctcttcctactcgaccatcaattctcacatcagaggacaaggtgatcccatgctttcaaaaaaagtccttggcgaggcgttttgctatggcgctatattggcattgtctgccggtcagatgaagacttatttttggtcgctggaaccgttttccgtttcattctttgttttcattacatacatttactgatcgtttctagtgataccaatttttccatcatatcaaatcaatttaaagactcatttacaggtgcggggttggagatgctgtaatctggatgaaactccgatacaccgtagagtgtccgagttatatgactatcctaagtgataagctatgattcattgaagttggttcactcaacatgtctttgaaatttacggtacttgaagcttacaatgaccatataacagcaccgtccttgataaaagtaaatgatttctcaattcttttctctaaatcttctgagtattttcctgaacttagctaggttatgagattttcagaattattagatccccatggacagtcaagaaatcgtcacggtctttccaccggatgtggtgatttaggcaggcaactgaatgccgtacggtatatcgaggattctaggtaagaaagtacaagatatgtgtataaaacgcagagtgatagtcacctgacatttttgccctatctctctctttgacgtcaaacaaagaagtaaatccaaatgtggcctggcctatttcagcttgagtgaagttcgctgacagattaagagtgtaggttccgataagacctaatcagcactgtagtatgtgttggaatatccaacttcacgccatactgatgatcacgagcaacaggcacaagactcgagttcagtgtctctagttatattgattgaagcatcaatatgtgaattgaagatgcggcagatgcgggtggataattgtgaccagaccaggtggaaggagtcagctgtggttgttttgtttttgtttctcaactttgtgaagccactcaggctgttgtgacaattaccatgaccatgaaaatttttagtggagagatttgcggctgtatgtatggttgtgacccggcaaggattgtggaattgtcgtcaatcaataacttccaaaagaaaaatccaggttgcggatcttggttatcgcagttggtgcagatatgtctgcagttgccagcttctgggggaatgtttgagcatagagagttgaaagtgtggaaagtgaagtgggaggtgggaaaaatgagaagatgggggaaattctgggggatgagtcaagatcgttcatgacagctggcgaaaagctgccgaccgggtctctttgcgaggtcacgcctggttgttggtctgcctcgaagcaacttatagtgagtagcatttaaactaccggccggagtgcttccactgcaagcctgtcgaccagaaccgtttctggctgctgaattgttttgagatgaggtgagggaatgggggataggaaggggagatatgagggttcctagaaacgagtcagtaagttaatctttatacaatgaaggaataaataccataagaaatggttatagggaaacatgtcatggaaggtccatggaggcaggttcataagaagtaggtcttggaggatgtgataaagacgaaggaaggagggatgtgtaggagaaagaaaaaaagaagagacaggaatgggcaaaggggggtatttataccctgtagcttaaggacctagagaaactcgggttggtgacgatatttgactaaaagggaaggacccccagggctgggtcgtgccttccttccatcttcgcgaatcacctgacaccagctctttggaacgcagggaataaaacccataggattatctggagatacacagctatataataactaaagatgaagctattcctggattgcacatagatctatgtaccaatatagacatatagacagggacaggctttgatttgtatcgtatatagttgagccctagtctagatctgaccgatttattcacacagacataccaaggacaccatcataagagcagcttagctcaacgccgctctccggattgtccacacacgaccactgcgtaccggatctcagtaagacatgaccgttctcagcaatcgggcctgagaccctctcaagtcccagtgtaaacagattgaagtcaacggcaccatcggggaagtgtatgtaatattgactgttgttgcatcgggcattttcctttggcgaagatccgtatgacctggcatcaaacggtatcagttagcgtctgccattgtcaatagatcttgatgacaaattagactcaccaaatcaggttgcagtcggttggggtgtcgtcggggtagtttggatcagtcaggctgaaatgcattgtagcagaggagccggcgcttgctctggcccagaagtcactgatctggatagagctgtctcgctcgatgatggggaaggcgatggcgccggcaaccagaggaggggagacaacagtaatcttcataatgaattgatagaaagatgtctgatatactatgagatatgaatattaaatgaaagagatactgtgggagaacgaattatttatatatctctagatggcctgaagtatacaaatctgaccgaaacactgcagcataaatgaaactaaaccaaacctatgcaagtctatgaaagtcgctggttggtcgaattgtagaccgccaccaccaatactcgtgggtaagcaagacaaatgtaacatgatgcagcattaatacgagcaggtagggccaattagctgtagcttacatgcagtgttatccatatataagtaagaaacaatacacatcaaactggtgtacatatcacatagtatgtacattgtatgtagatagtcgtactagtttcggggtgaactgtacaaagtaataatcataagtttccaaggtaccctcaatgcaataatttccgtagttgtaggccgacatatttttcgcagggtcactggacgattctgtctcaagtaagaaagtctcaagaaacttctaccaaaaatggaacctagatcgaaaaagcaaatacattcaactgtttacagtgtcttatgcccatgcctcgctttaaggcctcccaatatcttggcgacgatcattgctgtctacagattttgtcttaaacccgggggattcatgtcagacaataaagacatggcgaatgatagtgctttgttgaccgaaaatctcttcatattagtgattaagcacggtaaccagaaaacgtgcctttatcaaaggccatattgaatccgtaagggtctataaacttccctgggacacatcagaacacccgtgattcaagcaaagccaataaaagccattcttatagcagaagtttcatcgcgaatgaacctggatgagtatatccatctaatatttcctgcacaaagtgaaaagtgccctctcctggacgatccacttacgccaagtccaaataccaaacaaccctgcagatctctcctacttagagtctgtcttggcttcatttaaccgaagctgcggtcgatcggagaattaattggcagtgggaggaaattctatattgtagtgaacgtgtaaattccgatctactggacaggcggcagcacaatttctagcggtttatatgagatatgtgaatatcttagaattcctattgatgaaagcacgttctccaagaccaaggccaataccaagactttgattacctcggaaattcgcgcgattgccgatgcaatgaggtcaacggttacctcgccgatctggaatcccttcactcacaatccttgccacattccggtatgccatgacagaaatactgccttcgcatggacatgactttgaaagcgtagcttcccacctcaagcagggtacctcatggaagttgagactggcgtccgatattgccgtccttccaaggttagctgaaccactctcggactacgggaggcgcatgggacgaaaccttactgtgacgctaaagaacccaaattcctagctgattggacgatgaggatgcggatttttatcagatgatctgataggaggtgattgattggaatttttggacattgcttggccagctaaaccggaaatttccacgatataatatgctcaactgtcttcctccggtggtgccgaccctttgcatacaacttttcatccgccagcgaattgtgaggacccctcgattgtctattctgttacaatggaaaagacaatcatttccgatcaggtcacaccggccagtactagccatgatgctgagagaatagcggaactcagagtccaccagaacatggatgatttacctgacgacaaggcaagtctttctggtcgagactcgaacgagttccagggtggcgtgcaacgagtaagagcgattacatcggcatggtcgaccaagacgctcattctcatgttcattctgtaagtctggatctcaataaacagaaagtaaactaatatcccgccgaaacacaggctctaccttgtgtccttcgtagatgcactactaagctcagtcgaaaccgcactgaacccctacataacatcctcattccacaaacatggcctcttgacagtcgtcagcgtcgtttcaaccatcctgggcggttcatccaagttaacactagccaagatcatcgacatatggggccgcgtggagggattcctaattatgctagttctcgttacgatcggtctaatcatgaaggctacgtgcaagagtatggaaatgtacaccgcagcacacactctatactgggtaggccacataggcctgacctacgttgtggaaatcatgctggcggacatgacctcactcaagaaccggatggtcatgatcggcctgaacggtacacccggtatcgctagtacctttgcaggcccggagattgccacactcttctacaccaacctcgacttccattgggcatttggttcgtttgctatcatgcaggttggggtttgtatacctgtcgctgcggtgatgctgtttatgcaacgtcgggctgaaaagagcggtactcttgagaagactcgttctggacgttcctggtggcagtcaatcgcgcattatctcatcgagtttgatggtacgtatttccatatatgcaggtctttttgaatttgacatgtgactaaagagctgttttacccagttgtcgggatcatcttgatcacagccgcattctctttaatcctgatcccgttcagcatcgcctcctacggccctaaggggtgggcgagcggatacatcatcgcgatggaggtcctcggtgtagcgtgcgtgcccgcattctacatctgggaacgatactgttcaccggtgcaattcctcccgtggaagtatctgaaagaaccaacaatgattggttcgtgcatgctgtacggcgtgatgttcgtctcctgcttgtgagtgccagtctcttccaacgcttagaatcaaaggcacagcctaacgcttgcaaaacagtacctggaacagctacttcggctcatacctacaagtcgtcaacagactcgacatcacaacagccaactacgtgctcaacgctttctctctgacctctttcatcttcagccccatcttcggcctgtaagcacacctcaccaccccacacatacctctgtacaaagtctaacaaactttcttcgcttctcagaataataagctggaccggcgacttcaaatggaccgccatggctggcgtaccaatcttctgcctaggaacagctctgctagtcccgttccgcgcgccagacacacacgtggggctactaacaatgatccaaatcctcgtgggactcggcagctgtctgttcactgtgtgcggacagatagcgataatggcgatggtaacgcaccaagagatcgcagttgtaatggcgatctggggattatttgggtcgattggagcggcggtgggatctgccatcgcaggcgggatgtggaataatatcctcgagaaagagttgtataaccggctgccgcaggagagcaagcacctttcgaagagtatctttgccagtttggtgacgcagatttcgtacgcggatgggacgaaggagcgcgatgctattgttggggcttatgctgatgttcagaggaagatggcgattgttggggtttgttttgtgccgctttgtattctttgtacttggttttggaggaatgtcaatgttaagaagttggaaaaggagcagacggctgggaatgtgtggtagggaagggttcttgggaattggaaatggacagagcttggatggtttgaatagagatagaatagcaaggtacgtggagtatgtacgcaggagtagaaaatatcgacgttatgacttgagcgttgacttgtgatattctggataaaatattttatttgtagtgtggcttcaaccactacacttgtgcagatgcgctggacttcggagtatcctatagcgcgggtgtatgtacatagtttgatggcattcagcctctcgcaaggcggggcgaatgagagtattcttcctgttcgatggtgagagtatgagccgccgagatgaatctcacgggtgatttgatactaaacattggacttgggttgtgatggtggctattatgtggccaaaatatatacccgtggcccatttagattaagacggcaaatttgcctagaagcacggtggcatctatagacagcccaggaggctaggggatggccaagacaatggatgccctttcaagatggggtagaccaaagtaacatggtctctaaaagctagcgagcgaaatcatgccgatatctctcagccggccatagactcctcggggacctcctggaacgtctctgggaagaacccaggtggcggccagatatccgctatagaaggtgggtgcaccagtggttgtgatccgcccaagcgatctgggtcatgacagaaagcctggaacgtgctctcgtccaagaagccgaaatccttcagaccagcctcgcggttcgtggaccattcagtggtatccaggtacgcgaagtctttgaagatagcatcgatgtcgccgacggaagtgacgtttccaggcatcattgggtttgagcttgtcgagtcgggagtttgtggttgtggttgttgctgatgttgcgcgctacctgtgccatacacggaatctgccctgctgcgtggtgtgatcttgtccggtaggactgactgtacttcccttgggtggtgtagtgaaacatccatcatgcctagatccgtgttttccattactgtgtcttttggggtcaaggattgcccgtcgactggcatactgatgccaagaatagaagagttgtaatctccttcgccgttttggggtaggctgcgagctctacctagggattggatggagcctgccatgggtgcacccgaaaatggaaggccgactgcccctgggaaattggatggtccgccaatagcatcctttgggtgctgccacctctccatggcggaaaccaaagatccatatgctggccatgtggaggttaaagctgccgttttgtgtcggaactcgtctgcccacctggcaaaggggaaagtgtccgatgagtcggcagtagtccgaagtcttaacgtttgctcggcaattgtgcgaagacttagctcaaacagcggtggacaaccgcaaatagagaagttctccaagtgttgggtgagcatagagagccctcggtagaggagcttcttggccccctctgtggctggacgctgtgaacggtgcaacccttgctcacccggaatcaattgcagatagagccaaagcagggtggcaacataggttagccctaggtaactctgatggggaagcagggctgaatgccgttctggatatatgctttctggtccaatcagacggcatcccagaggtaggcagtcatcccactgcttaagctccatgaccaactgatgcgcaaaggtggccatattgtatcccgaagacatatggcgagagatcttattgagaacgctcgccaactcaaccaagcggttaaagcagctcaaggccaagagtggtccccggcgcggcgggttcttgctcccctgtggagcacccgtgggtggtaaaacgtccacccaggagttccactcctccaatccatcctcttccaaaaggcccaccgcagtaaggtcgcttggaggcatggctgggctccgtgaaaggcggaaagagagcaatgaatcaaccacaaagcatcctaagaagaccgccttaccttgtctaagctcatcagaccgccggctgtcggacacatatccaacacccatggcaaccgccatgcgcacggcttgtccgctcaacagccaagccgcggtccaatcctcgagacccatgttaaccaaggtcagcagcagcaatgcctggatatggccgggttcataacgctctttctccatggggatgagattccgcgagacggcatagtattccttcgccagggcaactgttccagcggggccggcccgtgaatttgttcgcgattgggtgatagtgtaactcatgatagcccacagggcggcatgatcgccagacccaggtgaagctgtggcaatagagaaaggggcattggcataaaggtaggaagcgcgaagaatattatgcttggtcaccacgggaaaccatgaatgcgtgaccgcaaagtaaatatcgagcagctgcgacgtctgaggcggcaactgcagcgtatggggactgggtccagcgacaccccgaccattcgaatcttcggatagtcgagcccgcttgacacccggcgatacggcaaagggctcaactacacgcggggcacccggaccgagcggggtggaagtgcgagctactcgatacccccattgaccgtcggcgccatcatcttgcggattacgcgatctcttcccagtcgtcggtcccggcgtatcagaattagagagcattttctccagggcgccgaacagccggctcgttttccaagattcgtgtagactttccgaagcactatcatccgaccacacggacatcaatttctcgcgacgaccggcggactcggcagtgtttcctagcatggccagcatggtatcctcgaatccctcaatgttacagatcgacagcgcccacagcttttccaagccacggacgtaaccctcggggagaccgcgtttcttcgcatgggggtcgtaggagcaggactggcccgatacctgacaggcggaacaagtgggacgaatgccgtcacatttatcctagggtcgccgggatgttagactgagcaaatgagatatccgagaaaaggacatggcgggacgcgactcactttcttactgcgacagcgatcgcaagctcgggagaccctcttgcgccgaggggccttatctgatccctcatccatgaagaggggttattagcgcagaggacacgccatgtagagtggaataaagggaacagcgagctctaggtcaattccgagttcactgaatcgcagaataaatttgcaagtaatgccaaggtcggaccgtataagaagcaggccgagactcggaacggggtcgaagatgagtgcaactgcgaatataaagtggaggagcagactctaatcaaaccaccatgtaactatggagtagttagcctccacgacaaaggacacagataggcaggccgagggaggactctcggacgtgaagttcggggtgtgaaggtactcggaattatcgggggatctccaacgaccccacaaatttcccacatactccgaacattgacttgctacatcgtatatagccgatttatagattgagagagcatacctgtaagtagacatgactacaccatttacactgatcagacaaggcaccaaggcaccaaggtatcaaggcatcaaggcaggcattccggatgtacacccgaccaaagccgacgacgcttaacccgattaggactttatatgcggcgtaaagaggctgtagagtgagcattagtttctcaaagatcaacctggagactgggctcaacactaaccctatatcggcatcgatatgcactgtgacttgtgtaagagatcctacgggatcgacattagcgcggttatgttgatgcagtttgatatttcatcgtcaatttctgcctacaacttgcagtatatcgtattgtatgaacggatttcgatataggctgcatttagtcgcttcaagctggctgaattagaagatttcgttggttcttttacagatggaagagaaaacatagcctcctttccagctataagtttacaatttattctctggcacgattctatggttccaattagttttcgaaaggaaaaatgtaagttctttctatcctatgtgactgaacttctttgccactacagactcgggaggagggcgagctcgtataaagtagtataaagctcgctcttatagacttgggaatctataaaccgtacggagcatgcataaaaagattatcgtgccacgaactaggctgtcccaaccccaggccaaggttttattctcaagaactacggattctcgcaccatagcattgggtatggccgacacataccaaccgcccggcatgcaagcttgctttttctacgtgtctccttgctatcatgcattataaaccatgttgcctatggagcagaatactacaaaattcaaccattctaccccaaagaagaaaagccagcgcttccaagtatgatttattggaccagggagatgaactatgaacaaatatgggcataattcccaatttccacaattacaatcctagtacggagtactacgtatgtgtgcctttacgggtcggtccgtttcgtatacgtcgtgtacttctgtcagtgcgatttgagataggcggctacatgagggggaagtcttactctcagtcttactccgttgatctatactccctacgtccatcaacatcacgagcgccggacggagcacgatgtcgcaaaataagcaaaaagtatgccaaattcccagaatcaccacaggaagttactttgggacaaaatgatgccaaagtgtccgcaccgaactaatttagatatgcatcatgtaagaaatcaatcttttagtgatatgtaaattcttttgattatagggactgcaggccgaaggtactggctcccgtctctgcgaaagtacgccgccactactccgtgcatgggggtgctttatttgcaagaatctcaatacacttcattggcgcgatgtatacgctttccgaaagtagtcttcttgatatgtacactgatggtttcgtcttgctctctcaactggggactgtgtgtatcgccgcccctggcacctgctataccatgaacacagaggtaatcatgcgctggcacattgcgcatggtggcttggctggctctcttcgacccgtcgctatttgaattgattagttggtcgtggcaggaatcgtggcattatcacctggaatcaattcagaagccggctgacttgaagcaatggacgaactctatctatcggtacagtcgacaactttaatatatagcaattgagtaaagacatagtccatgatcagtctcagtctatttcttatccttcctcgctaaactgcctctgggccgggctctggcatatcccataatgagcaataagcgtcaggtcttcgtttcgcttcatcatcgcgactctccttctctcggcgggaataggcaacgacttggctatgcagcctaccattgggggattctcatttctcccaaaaattccaaaggactagactgctatgctttcgacgttagcgatggacttatcctcgatcctgtaaataggcttaattgcaatgagggatacaattggcactttcgagagaaagtaaacgttgatccaacccagggtggccaccttattggaatggttatggttggaaaggtgcctcatgaggctatcgatgcgcaaatctacggtcttcttaaagcaattccacttccccaaaagggttcacggccggagcaaaactgcgttacttggacgaaagccgtaatttacacgctccgagagaatggttttgtggagatattcgatatcgatcggtttatggacaagacgctcgcattcgcggatcaacgcatacaccgcacaaaatctacacccgatagaatcaactacaccagtcggagtatgtgactcgtgaaacgcctcatatggagggaaagctatgacacttactatggaagggtggacggactaagaaagaagaggagagaagaagagtgaggaggggaaacgggaggagagggagaggaagggaacgaatcatgttatatgagtgaaagccttaggcgttcgaataagatctcattgcgagaccgatgctgtcacgcaagccctgaatcagatgctctctccctcgccagaacatttgtggatcatccaatagcctccaaagaactcgttccgcttcaagcttgtcgtcatatctcttctctaaagcatttgccaatccactataccattctggctgagctatcgcgccgtagtttgccttggtatactcccaatattccgggtaccagccgccaaattgccaatcaacgatcgcagagaccttgccattatgcaccataatattccgaggagcgaggtctgcatgggtaaagcaacttcgatagcgacgggagtggcattctgcgatctctgggcctaattcatccagagggatatccgctcgaatgtatgagtggaatgcttcgtggctcacaaatggtccgaaaccccaacttccgactcggtgatcaacgttctcaccgaaatttgtggatgcaactattccttctcgcggaggttccagtttccgaagctggctaacatatcccgcaacctggttggtaatgtacttcttctgatcttgcgatagttcggcgcggttccatgctatatcgagactcgttccacggataaactccatttcaatatagaaccaataatcgtagtagtgggtgttgaatactttagggacaggaattgatgtgtgctgagcgacgtatttcatggcttctagctccgatataggacaaggccctttaatcattctgccagggctgactcggactccacgtggtccaagtttatctgctccaaaggttttcttgccaatccatagtcgaagtggaagaagataagaggttgggtgctttttcttattcgccatggctggcttggctcggtagatggtttcccttgtattattgatagggtgaaaagaaagaaatgtgaatcgaagagtcggttgaatccacgtttcactgtagtgcttgggcttataactagtaatttggcccaagctattgtagctcttcattctatatacaatgttagaatggttccaactagtcaatcaggcacactatctcattattacccaaaacagtggaggagtacgctatccaggatatagaatcaatcgtctatgtccttgcaaatacggggggcgatgcggtctgatttgagaataaggtgtggttcaggggtacaggtaggaaggaggcgagcagactgtttacaggtgacaaagggtgggtcacatgactatcaacacgagcatcgagttgggatatcgaaggcgatgtgaaggtccatggagttctaaacatttatttcgtgtgatttcgtgtgatttggagacttcgatattggctatagcactagtataaacatttccccacaaacccacatctaaaagtaaagggatccataaagacttgtagtaactcatggtgagctcttcggaccagcttccagtagatgatcccgcgagagacatagatttgacatgagatgatgtgcagtcaactccactttgagatttgtatcttgcatctctccagaccgagatctggtggaaaagccttttgccggaaccaaattggccggcaacttcctaaattcctcattccggggaacatctaccaacttggaacatcacttggcatattgttcgactaacatacttagatcaagactattccagactgtattgtcctgtctgttgtccacatgagcatcccttctcatcccttctcaacatctcccgcattcgatctccgaatgcgattctatgccttctgatcatggcgctcgttcactcgacatagaccctaattgatctatcgcctctcaccatgctcgattctaaaccctcaatttcccccacggtcgacgccaagtccgacatccccgcatgtgccaccaaggaatcctcctctccaaccatgctccgccccgagtccgcccctcgaacatttgctcccaatgcatccctcatcctgatcggcatccgcggatgcggcaagcgctcgctaggctttgtcgccgcgaccgcgctgaagcgacgcttcattaccgaagaccactacttccgagaggttacaggcgtcacgcgacaggaatacctcaagcggtacggcagccaggagttccagcgacgtgacatcgaagtcctgaaaatgatgctggataaccaccgcacgggctgcgtcgtggagtgtgggcttgccagtctgacgcgacctgtgcaggatcatctgcgtcgctatgcccggtccaacccagtggtgcatctgctgcgcgatatcgatcgcattcagcagttgctcggtttagaggaccaggcggtacggttgtttcgggagggggacccgatgcatcggatgtgttcgaatttcgaattctataatcttgaagatcgaacgcgtgcgtcggaggatgggagccccgatcgccggtctgcggattattcattcaaactgcaagaagtaaaagaggactttacgcggtttgtgcagtttattactggactcgatgtgaactattcaagctacgattcgccgttcgttctgctggagacgcccccagaactgcgctcttttacccatgctatcttcgtgcgatcttccgatctgatcgccgacaatgtcaacctgactgaacttgaatctggtggagatgccattgagctttgtgtcgatcgatgggccccagacatggcagccactatcagcaaacaggtctctgtcctgcgtcgaaatgcgcggacgcctgtgattctctccgttgacacctcatccatcggcgtccgctccccggagccagccacctcttcttctcgatcttactttgatattctcgcgcacggtctgcgcctgggtgtggaatatcttgttgtagacctaactcaagaccaatcccggctggctgggactatcataggtcgggggaataccaagatcatcggccagcaggtctttgaaccatcttcccccactacatgggacagtgcggactgcgtcgccatctacaacgaagctgaaaagctcggctgccagctcgtccgcctcctccgagttgcaacaaatcgcgaggacaatgccgctgtgactgagtttactaataaaatccgatcgctcccgggagatcacccaccgctcattgcctataacgttggtgccctagggcgcacctcacaagtgttcaactcaatcctcactgcagtaacacacccagcgatcacccagtctgcagattataagcacgacccgcaaataacctctcgcgacgcagtccgcgctctattccaaagttacgtgctcgacccgctcaagttctacatctacggggagaatgtcgcctacagtttatccccggcaatgcacaatgcggcacaccaacactgcggcatgggccacacctacagcatcccagagtcaccctctctcgcggtattagaccgactgggccgtgatccacactttgggggatccagcgtcgtgcagccatggcgcgtacaggtatatcaaaagctcgcctcgaaaagccgacacgccgaagccatcggggcaatcaacacgatcatgccgctccgcggacacgcagacggaacaatgttcccacttcaggaacaagccagccgacgcaaccaagccgggcgcgtgctgggatggtacggtgaaaacactgactgggtcgggataatgacgtgcatacggcgacatctctccccgcgcaacgcgattagcgcaaaaacaacaggcctagtgattggcgcgggtggcatggcgcgggccgccatctatgccatgctccgacttgggtgtcggaagatcttcatatacaaccgcacgcaatcgcgtgccgaggaagtcgcgcgtcatttcaactcctgggcgtcgtcgcaagtcgactcggctgaggtagtttgtgtcttgaagtcgcttcaggaagactggcccgcgggcactgctcagcctagtctcgttgcgtcttgtgtgccggctgatccagaccgagatgaaccaccggcaaactttgagatgccaatgcagtggcttgggagtcctacggggggtgtgattctcgaggtgagcttttttcccccgggatattttgacttcttgtcacacgtactaattgcatatagttggcatataaacccctcgatacgccacttctacgacaaatgcgccgagtccggagcgagaccggacggccttgggtcttgtctgacggattagagaatgttaccgaacagggaattgctcagtttgagttgatgaccggtcgcaaggcacctcggcggcttatgacctatgaggttctacataattatgtgggtgatagtgggcgttttgacgagaagactattcaggctcgtctagatggtgttgggtctccggttactcagaaacaggaatagagtgtattttttatgactgtgatcgtttcttcttgacttctttcgtcagttttgtatatataaaacaatctcaaacagtttatagcagactcgactcgatataatctcaatcgcgtgcgctgataacactctcctatcagcacaccgcccggcccgagccctctttcttttgtttgggtctcgtcagcttcaaactcgactccccctgaggtttctttgtgttcctagccctctacaatatagtcaaattgacttgaatagggtatactaccatcaatgccagggttttcgcccgagcagaccgactcgataacggcaacatggaagaaacgcaagcgggaccatgaggagtcaaggactctagcacgtccgtaagtcttacaatgtatctcagtgaggtgaaaatatagattaacatgcttttcagaacaacatatgccccatcctaccgagttgattggcccgaatacgacggtagctgctcactgcctctatcacgacacccagaaggaacagacatatccttccgaccacgctgtctcccccgcaagcgccgacatatccaaggtccttatatagcactaccgtctcaccagttccagcctcaacaccaactccaacacccacatcaactccaacaccagcaatccccgacccacctctccccaaatgtctacagcaccccaaaccaagacccatactcacccccggtctcccccaaaaccctcgtccccttacactacccaactcaacaatccgcctctccctccgccctgcgcccctgccacatctgccaccgccgcccaacaacccgtcaagtcctcgacgcctatgcagactgtgatctctgccacgagcgcgcatgcttcatctgtctccggcaatgcgacagcacatcctgcggcggaacattcggtctagcagaagatccaggaatacacatgcacatgcgcacaagctcaaccgacgacgtcagctacggtgccagtgaggcgccgaggaggaaaatatgctccggctgtgcagtggaggaagtcaccgagaatggggcggagattgtacgctgtcttgactgcgtgcgtggtgcgggctcgtgggctccggtggctattccgtctgattgggatttggatgacatgcggcatgaggatatgactggatgagggttatatatggagttgatttacttgccttctaccgggggtattgaaagcggatatgacagaatgacagatgaaactatggcttaacattctttacaacctcagggttgttgctgctccttgggggtggctttttttcttcggagtttgatcctgggactggactggctgggattgaggcgggtttgtttttggcatttatattggacaaacagcatggcaaattaatgatttttattgctctatattgtagcaaatagcataatgacatcggcctttatatacccaactctatttattgacagactatacatactactcttggtttacatcgaaaggtagaaaccaagccaaacctaagtaaaaagccaacgcttatattcctgtccaggtaggaggtaactgagcgggcaatgcctcagtcatggcttgtaggcatatttcctgccattagtagtaaggcaagtaggtacttacgatttgtatgtaaaccactaataaaatcaagtcttttttgtcatagcattattaactgctttatcgtcaactactttagcaactactagccggacaattcgggggaaaaatagggtttcggcacatcagccttgtggggtgccctagtccaggtccaggcgtgaactttcgtctttctctcttctcactgcatgattgtctgttctacgattctacagatcggcgactatctggtatttgcatgtttgtaacttgctccttctttctctcattcctcatattattttgaatagaatacactctgcttcctttgcaagatctggcacatcacaacactttcctctcatcttacatctcatagcactatcacttggctggtcacagcattaccctctctactatgatctgcgaccacaccagcactgcatactagcactatttaactagtgctaccgcgaccgcctttaaaatcaaccgcagctatgctattgctacatcctaatcatcctcagcgtcttcactactccatcctcgcccacactacaaccacattcttaccaggatgagctggagcaccgcgcggagggtatggagggtgccgccagcgaaaatatcataagctcttcttcaagctcaaaacctcagtgaggaagctcttgggcaaccacatcgaccgaggtaagctcaagaaagcaaccgacaacctagaggataagagcaagcaatatacgagcgtccggatctcagaaatgagcgtgaagaacgtggagcagtgcctctatcttcaattcgatagccatgatcgggagatgaaggacgtgcagtcgcttccgctccctacctcggtacgcaatttaagacatagagtatcgggggaatctagctaattggatatagtgactacactaggtctcattgagaagacttttggtcaatctagaaccaccgaagctagtgcccggtaggttattgaccctatcattcttaacgcatgcgacagccaccgcagatatcaaaaatgcgcagctattgaatatccaatatgagaggggctatactttcggcccggttacccttgaccgaaagagggtggttctttctggcagaccggactacggtgtctggtatggcgagagcgagtacactggatctatttggcattttttaaaaattagtcacaattcaaaggtaagctggttcatatcagccaagtgaatcactctgatatctactagtggtcagaatttgctgttatcgtcgtcggggcgctctcgagaagccgttcggtttgctagtgtggatgctacggaaggcagctgccatctccccaggaaaccttggcggaaacttacagtggagtagggtctgaggagatggataactattgatcttatccctaagtaagatagtattcgaatgagcggtgctaaggggaaggaggagtgttgtactgattcatggcgcagcatggcgttggccgacacctcttcccccttctcacttgagtcagctcttattgcgaggccatcattgctagttgcttaatctctaccttttaagccctctcaagcctctctcatttctccccaccgtcatgtttcgtgcaccttcatactttcttctcaataaagatccccgtaggccttgacaagtgctgcagcacctagggaattttggtgctgagttagggtactgcgccagcataattctctcaagaattgctttaaatggataaaatgggtttggccgcctggcacaattatctaccagcactttatgaatatggtaagggtatagcctgagttaaatctccaatgttcatccacatacaaccctacttcttcccaatctcaatatcaatctcgtccctccatcctccagctacctaccaaacctcatctgcgctccagcaaagtgccaaagaccacgcatatacccctgatactcaaccgcctccccatccccgataattccatgactgcgcccaccggtacaatacatctcggtcaacctcaactgccatggcggatacccatcgagcttaaggaacggaccaaaaacaagcaacagatctggctctggcttgagcaacgtatctggcatcgtgggatccatggacagtggctgcgtagtgatctcgctgatctccgcgtcgaccaactccggtgtgatatcttccggtgaaagcttgccattctggctcatgtccgctagggtcttagttaagtcgacgagggtctcacggccatcggttgaggagaggaggaggattgtcagggtttcgggttgggttgtggtgtcgatgttttttgagatgggtgcgctgcggtgtactgggtggtgaggagcgtagagttggagatttggttggtggctgggggtgccgtagtaggatgcgagtttggtggtgattatttggtggagagccggaatgcaggatttcaggacgccttggtaaaggttagtatcactctatatatcctagaatatagagaggagatcattcataccggacttctcgtatatactgagctggcaaattcccgaacacgaactccaggccgccagttcagcaatctcatccatcaacaccgcgagagcatcatcttccttccgaagcgtgagaatcgcacttaaatgttgcggcaagcgcttgagattcttcacatctttccggatcagctcgggggtgcggtggtggtgatagacgattgcgaaaatgcggtcgatgacggcatggtacgcctgcaagagacggacgacaataccgaatatgatatgcgtgatggcataggtgaggtagtaggtttgcgatttgaggaatgtgcggacaggcgttttgcgtggtgttttgcggcgttcgctagtcgattgaggtgatggtttctgaccaagctccgtggggtcggggagatagctcttgaggagggattcacgttctgctatgctgagttttgtgccacgggcgcgtagatcgccgcgcaggatctcgcggtctcgttgggagaccattgtcgtggtgggtgaaggagggaagtggagatgtggttgtacgacggaattgttgaacagctggaggttgtgtactaatgatgaaaagttgttattgttatggctgttttcgaagtatgtcaaatgatgtaaagcattctttctatttatattacgatatcgagtccagcttcgaatatctctgcctagtgttcaagtgcacactgtatatagaaatagaatatgtgcgtggcagtaaacctcccggaccagatccgtcatctccctcagctttccccggattccttcctacaattattcccccaacagtttaagggagaggagacaccattgtccagctctgcaggcagctcatgtctgtccactaccaatcatgatggacaatgcatccatcatcacaaactccgcccgcaccatcttcccccaaggccccagtttcaccctcgaagacttctctagccgggacttcattgtcaaggagttcattgaagccctctccgacactgctatatcccaccgtcgctcgctagccggtaccgccgccgccgccgccaaccaacccttcgatcccaaacccctcatccgcgccttcgaaagcgcccaacgtcgcctgagcgagctctccggggacctcgagctccgcgagaatgaactctccgcagccgtccgacgtgcagaagcgcaacacagccagaacctcaacacccttggccagaagcttcggcacaccatcgaaaactttcaacagctcgacacgtctctaaatgctcccggccgcgagcatccagcagggacggggaacatggcagtggagacaggaaagcgcctagaggagctagaccgacagcgacgacgagctctggatgcccatttccttatccaatgctgggacggcgtgtgcaatcggggcgagatctcactattggagggcctgcgacgatctggcacgggagaggcaaaggtgcgctccgcaaacattgcgcgccaactgctgcgcattagtcaacgactagacccgcagagctggcaggaacaccgggctcactcgaatggtgggtacgggaatagctcttcgtctgaggatctcagcgaaagcagcacgccgcggcggaacacgcgggagattattgagaagttctccgagacgctggagaaggacttgctaaagcagtttgacgatttctaccgcaaggctaacttcgacggtatgagggattgtgcgactgtgttgcaggatttcaatggcggcgctagtgttattgccttgtttgtcaaccagcatcagttctttattgagcgcagccagctggtgacggaggaagtcggtggcgatccagagtcgtgggagaaactggctgatccggacgcggagctgcctggtgttgaatccagcctccagtcgttggtcgatgaagtcaaggttgtagtccaggaggagtctgctattattcggcgggccttcccctactacgagcaagttctgggtaagttcttacagcgggtctttcagcaatccatccagcaacggctggaaatggtactggagaaagcggcaggtgtatcgtcactagcattccttcgttgtctacaaagctcccgtggctatattagtgccttgatcgaagatttgaaatcgcacgggttgaccgagcatccggaacctgtttcttcgcagacagctttgttgctggaccagcaactggaggagcttttcgttccttatttcgttggatcgtcttacatcgaacgcgagaagcgaacgttagaagaacttttcaatgcggttttgttcaggttcacctgctaccatgcccgccgcaagaaggcggcaacgactttcatggcctctttatcccgggctggatcagaacttctgtcgactacacgcgatgcatttatcagccggttggattcaccagaggtctcacctatccagcgaaaagttctactcagcatagccaagataggcgatacgctagagacaactcgattgaccgaaatcaagctcacagaagaagatggacaacccaatcttagcgatgctaagcggatgctgaagtggctcgctgaagccgtgggccgaggacttgagctcagtgtcaacagcgacacacccaaagatgtctccgccttgctcaacctgcttctcctcgcgatgggagagggatatgtggatgtctgtctagatgccgccctggaagcggctacgtcgcaggaatccggcaaggccgagcccgacttctcctatctcttctcggctcgcactacgatcagcattactacattgatggtgatgtgcatccatgcggtccttatacctctatcagcctcgagcatcaccactcgccgcgatatggagaagcgcaccagccaaaccacctcgcgcatcgaggacaaaatcaacaccatcgagcagaaaaccattgacgccacattcgcctgggttagtagatcgctatctggccagaagaagaacgacttccgccctagggagagtgataacaccgcatggttagagatgctacaaactccagtacgttccatctaactacccccaaagaaccctactaatcccaacagacctgtgcatcaatcacctcatttttaacccgtttccacaatatcgcgcgcacctcgctcccatccagcggcgccaacgtgcgccaagtgctgaccgagatagcactcggaatccgtaatctcctcctcgaacacttcaaacggttctctgtcagcggacctggcgggctaatggtaaccaaagacatgacgcaatatgctgacctcttcaaatcctgggacattgacgaagagaccaaaggccccggtggcgcgctggacgtgcttctggaagtcggcagtctattcgtgattggcccggaggctcttcgcgaacgaatccgtggtggtgctgccagtggcacgaccggtggccccgggggttcaggacgcaatgctgtccaggagggtaagttgagtgtgcaagaggtgcgggcttatatctcgcgtcgcgaggactccaatacttttgctatgcaacaggttcttaatgcattgtgaggaggagatcttggtctgggatgtttataccctattgtttttgctttgatgggagcgtgttgtttctactgggggatatagaccggcgtaacaataatgcatgcattggtacctgcttgtcttgatatattgctttcgtaatcttgttccatgattgctttaaacaatacgaagataacatctacctagagcttttgtatgtcatgtacgcaccatccaggcatcgatgcgatacgccctgtcatgcgttgcacagcgctttccggaagggcctgtataagaaatccggaacatgccaacccctccgccagaggttataaattctctttcccctcttctcagacttccctgttgtcgctcttctgtcacatcccgacagaactcccaactcagaattctgtcgctagcgggtgtcgccgcatgattcagttcactccactgctggctatctgagtggcctttcatttatgataacagtctcacagtctaacagtctcaactgagcccggcagagctgcacctctcctgtgccgccccgtaatgcaaaagacgggtgttgacatggcatcttgatatcaaccagcccacaacgcaaagtctgctgacggtatcatggtgcagggtgcatctccatcaatcgataatcatttgcatcatgagttcatctatggcaatgcctggagcagctgaatgagcccgacgaagctgaacctcgctaaagtacgtatgatcttgactgacttggtttctctccagtcctcttccaaatgatcgtcgctagtgcgtctccactaaggacaaacagaaaataaaaaaacagaacgcaagccaaagcaagaagcccgagatagaaatgcctagattccaatgactgatcggaaagacgccaagagtgcagagaagggcaaaggccatcttcaacttcgaagtatgcaactttttaatctttacccagtctcgtttgggttgactgctaattcttttgctctaacaggaggaacaaaacgggtctttgtgcccttcctcggttagggctgaatatttcacgacgtcgcgtcgggtaaaaaaggtatgacatcctttatgtacattcagagttccattgctaacatcttcaaggcaggccagtatcaaggattcttcgtataggtctccgcaattcccgactcaggatcctgatcatcaccacccatccctcttatatactccgagttccctctccaaatcccacatatcaaagcccatgcgcagagcgactggtgccacatcagtgatcagagccatcgaaattcttctattcggcatcgcttgctcaccccctgaacaggcaaggaagagatcattgaagtcatggaattggtcaagatctctgggtctccaaatcgtccactataccctactctatgcctgtttcgcggaggacctcatgcatggtctgctggggccacactcaagagggttgagcccggatacctttcatgaaatctcgaaggatgatctatatgttggttatgcttaccactatatatttatcctatacgtaagtcgcaactttgcgcctattgcaacccctcctccctccaccccatcactacatcagtatgaacctgctgaccaatgacacagaatatatatcctggggttgatcacacctcttctcagcgtcacgtcatgtctatcatggctcaatggatgactattggacagtggacgaggaaaaccttcgggttatgagcatgaaagctccaattcttgcttcagaacatgctgatagctgctcatgggaagttgggcggaaagaaatgcaccctccgtccgagcaaccaggatatctcgcagccccatcgtgggtatatgacatggtgaaggcccctcatcctgtgaacgaggtgatccaaaaagatgtgtcggtaaaaccacaacaaacgctaggcgcaatttgagatgacaaacaatccaagcgaacctgtttctgctcacgacaatcttttttgatttgaacaagacggcgaatatactgagctgtgagtattcaaagccaatattctcaagtctagactagactaacacttgtgattcttagattctccctgttcaatcagagaaatcgcttgggaaaggtggaaaggaagaaagacagctcagctgcttagaagtgtggtatagctcaccaggtacaactgcactccatcttcggggctaccaggatgagagcaaaagaaggctacaattaccgcccatcgagcgagaggaccgagatgtcgcttgaggaaaatacgagagaagatggagaacaacctactgaacaaggcacttgaaacagaatgcttgcagggatgaaccgcactaccattacaattatggaagcgtgttcgccgagaaattaatccacatgattgcaggcacagggcacagaagtcgccgtccgcaactcatcgaaaaggagcgaaacggactacaaattcggagacttggaagtagcgtgctccgaagcatcctatacttgcttcgcgacatgctattcgaaaatgtcttgaggaggatgccatgcttacttggcaacatgctgtgtggaatgaggtatccaaaatcattctactgcccgtgatatcctcttctggctagttcatttctctcgtgctggtcatagcggacggttccctcttcaaaaaaatccgtgatgacaccacacggccgtccgcctcagccttgacctgtacctggataatatcgggtcaaggttgaggccggcttttccatagggtacaaatacatcattgtatccatcgagctggatgtatggaaccagataatacaggaggcaatcatcgacaccgcaatagcacgtggtgacataattttcgatccggcatatgagtgaaaaggccaaaagaataccggcaagacagatccggagaaactgggtatcatctgccatctaggtgtattcctagttgctattgccctgtgcttagacgagaaactggatctcgctggtcctgtgtgtttgcttatgctactgtctcacaacttcacatcttgccacgagcaggtagtagtagaacatgtgggtcatctgagaagtttgcagctgaaaaatgatgggcaagctgtccggggtcctggtgttgagccaggttgatttatagtcataggaaaaggactgattggggaacattcacacactgttccggccatgttccttttgcgttttctttgcttctatgtctgctacttctggttttgctttttgcgactatgttgatttccacatagtacacttttcagtggaaaggattgagctctactaattctatagtaaatcttcatgtttgaatagagatagtacctaaggcatagatccaccacatccacactagaaaataagaaaagtaaccatggaacaagcagacagtccggtgaaagctcaaccttggatgtctcaggtacagagctgcaatattatgtacaagccttccgggataagtgggcagatccacgtacaagtttcatcttgccctgaattgaaggtttgatttgtaccatggtactatggctttaatcttactatgttccagttgatcctgtttcttgtaacatggcatgtttctcactacatctccaatggttgatctggatatcaattgtataaggctccttcccaggcaaggtttgtggctgaaaaacccaattggcggcccgaaactttaccggtgaactgcccaattcggaacgttctgactcctgaggttctcaattgtcgactttttcttttttttttgtaccttacatgttatacggagtcgaaattacgacagcggaagaattatctacgtcttcaggtcagtgcccagtttaaaggggctatcaagcctattcggcagtttatctcccggcacagttccccactaagcttacagactcgggtatcatcctaccagagagagacaagcaatggaggtgaaatgcagctagtagctttagttcgcccaggtaggaagaaatatggacgatcatcgcgtcagatctctctggttcgtatgttgcaaggctaaatactcggagtctgctccactgcgcaacttgtccgagtacataaatgaagactgtggaactattgagggcttctcttgggcaagaattgaagtgctctaatattatagttggcttggcattctacgattggagaagcaatagctattctatagacacttgtatggaaaacagggaccacaaaatgattcagttggtccgtggtaggcactcaattcacgacccgcattagtttattcttaaccgtctccatatttatgttcttctggcccggtaggtggatggttcctgcatctctgaagagattttgcagcacatcgcagatacaaaggccacggaaatgatgctacactaccatatcctaatacttgtagtatctcaccctaggttgagaataatgatgttgccataacatcctcattttcttcgctcaaattccagctgtactagtatgccctagcagttctagtctcacaaatggagacgccacccaacctggcccacagtctcaggcaagaaatttactccagggatctttatttgaaaggttatttcgataataaatagaagagatgccctcgaagcccctttcatagcgagaaatccactctttcactggtgacctcgggttgccgtcccttcattctgacttctatacattcatttatgattgcgaattgaatatatacccccaatggctgaagaaagccctagaaaatccatcgtggaagatgtgttcattcccaaagaactacttgcgactgccaaattcaactcgccgtgggaattggctcgatgggaacattctctccccgaaaacagtcgtatatcacttccggagcctcgcacctcttccaaacgtcctctgagtctttcttctctgcgagtagtggcaagaccaaagcctgcaactcggtctcgtggacgcagtgatccttctgcttttcagtgtatgaaattgatatcctatttctatggcaaagacttgtagaaatacatgagagatgatgataatcttatatctcaatactgatcctttctcgttcttcaggtacattcgactactatgaagagtccgccacattcgagcctccctctccgatccccgagaaagaaccaataactccaattcagaatgcattcctcagtccccaatcactcagcaaagtcagctctcagacaatcagcagcgagcagagcagcctgcaagaagtctatgaaaaagccaaattgagaggcgttgctatccaacgaaagcattgggtgcggctattgtttcaatatagcatttatgctttcctcgttctgttcgtctactttgtcctcgtcggtatgccactgtggaaaggtgctgtctggtggctgtattattttgtccgaaccaagttcgttatccaaggcggatacgcaattatcattggtctggctgcattgtaagtgttttctcgagtcgccaagtttcttgccctaacaaactagatacgcattctgtcctctgatgatcctcttcgagaaggatcctccagccctagattccgaatccgaatctccagacctggaaagtaatatctccaaggtaaaagcaactgctctcctcattccttgctataaatcagcaacaatcgtcggcgcaacactcgaagccgccttgaaaatcttccccaaagagaacatcttcgtcatagcaaacggcaacgacaaaaaccccctcgataacacagaagaagtctgcaaaccctacggtgtaaaccacctctgggtacctatcggctcaaagatcgtggcgcagttcgtcggcagctacgcagccaaagactttgaaaatgccgtcctaatcgacgacgactgtctccttcccccaaacttcccaatcgccagcgacagactaaaaggcaacgtccgatgcattggatacacaattaaaagtgtcggccccaattcttcaaagggaacgttctgccaacaagcccaagacctcgagtacaaaatgtccggtctccaacgtgctttcttcgggaaattcggaagtgctacattcccacacggagccatctcgctctggaatatcgagttcttaaaacagaccttccatgaacatcccggcttctccgtgtcggaggattggttcttcggtgatgcgtgccggcgtctgggtggacgtattacgatgtgctcgcaggtcttcgtcgaaacagagacgccggcttcggtgttctggagtggttctggtggtagtcgtggtggattcggcgagatgactatcttccaacagcggtttaagcgttggaatttcttcttcgttgttggcgtgtactatgatttgaaatatatcttgactagctggaacctgggttggtgggagtttggtgcaaagttgtgcgtttttcaagaggtatgacaggcacatccatccatctaggatataagctaaccatgacaggtctatgaaaccctcatctacctctttgcccccttcatcctcccaatctcatttatagtccgtccctcattctgcggaatgctactgggtattacggtcgcgatgtacatcctcaacgtcataatcttcaacgagattcacctccgactaaagaaggagcgcattgactggaacgtcttgttgttctactatacgttctacaagatcgcgttgacggtggtcaacgtgttcagctgctactggtcactgtacaagtacgcgcggtactttgcgcagcggcatccgaaggtcattgaggaccgggatgcggtcgaggtgttacttagccttgagaaggattcgggttcgaggatttcggttgaggatgatgttattccagttgatggtgtgctagggaggggcgttgcgaggaagttgacgataacgaaggttcaggctggaaagaggaggatgacggtgggatctgagaagggtggatggatttgaatatataaagcgagtatattatagactgtacatttacagagtagtgcatatgcacctggattgcaaacgatcatggtgggactcttcattctgtactagtaatcctcgtttgatagagtcgggactgtctcacatcttaagtgtccagcccaggagaaatgccaatgtccaggtcttctacacaagtcttttgtggtattatctagttcaacctagctaccattgcttacttgacaggggtctgagtcctggaatcgatagtatcgccaccgtggacagcatcaccaaaacgggcacttgcatcagatgcctcgtatcttttcttgaagctaggaagaaacacaccctaccgtaccagcggtgaatgtttcactcgtttgcttccacaaatagtaaaatacaacttgcagatgatagatcatgtgtaaaagcccgacttcgcacgcctcgacgtgccacgacgtgccacgagtccggaaggagaccccctcgtttgtctcctgcaattggagttatatgcattagcccgaagcaaggagaataaatttggattgctctagagccaggaaacgttcaagggatttgaagcgattgctaagggatacgccacgttccgtacttgagcagaagaaggggtttattatattgtcaacactgtcgattctacacgtcatgtagaaggctagactacctatgttttattaagttccagcctaaaatagtagtctggatcacttgcatgcaagtgctattgtacttcggaataatagccgatcatctgggatatgttgtacatatttgtacattgttacctttcaactaaatctaacaaaagcaaatcattggctcctggtaatctccgaattaccgtctggactatgaaggtaatttaatttggctgagtttggtatagatcactctgatttagaattatatgagctgtcaggtacgcagtagtgtaacggtcttcgaagaaccggtttggttcttttggctgtttagtactaagttagtgtcaggttagttagtgttgactttctttgtcctagtggacacccctgccatgaactgttgttctcattggacattgaaaattcgatacatcacttccccccaagggatgtcgttctcgtattgtctgtttcccgaccgttaactccgcgacaatccgatagtaccaaatattgaggaaatagagaccgggaacagggaaaaggcacaaagacctcgtcgtttccaattttcaagttgaaagtttccccagtcccgatctaggataggtgtgtttcagacagaaaatcagcgatctaagtggagccgagattgatctccttactgggccacgtcaaagcgcgtagtgacttggagcgcgtagtgacttggcttcggtgagcttggtgacttggatgggattgaggatgaatgggctcatatggcttgaaggaatatcgatcgatcccgagttcgtttgacaggttcgtaggaagtaatacagcggttcgtgatagatcagatagaggggcatggaaggatcgagaggtgagatctgggaatagaagtatcacaatcacaatcacaggcagagggcgctaatgtacagcatcctgtcacagatcaaagagtttaaagatattcggtattcttgtgtatatatacagagggatgtctccttttactttttactttctattttgattgttctattgaattgttgcacacggactctataggagtatactatatccttggtatacttatacctggactgccctcgtcctttctattaccccaatcctgtcaatttctccatactcctgtacaatgtcggaggactttgagtcgctgcctccagcagtacgaagaaaggtaagggtccattgttgtcctccctcacacagcactccttcgcgtctcaccgtcacacgctcggacttctcatttccctccccaatagctcccctccacaggagatcggcctgacccaatcaggcccgctttctccatatttcccttttctttgtctgtccttgctctgtgattgattgcgattgactgtgatttacccctgaatcccctcagtggaagctggcaatccacactatcgtccatggcgccactcgttgtctcgtaacattggccatcatggactaaaattggccaatgccagccaatgccaccgcatgggataccgttggctccgccccatcccccgtattgcctatccattgttgtccagtgtccacagctaactcgaacagttcttctcgaacgtcgagcgtttacgtattcggctagcccagagcgatcacggttcccctgcctactccacatcaaactatcagacggataatcgggtctatcgagcccctcgtcttgggtcggaccatcactcgcgtggtttgcggaacggatctaggaagcgagggctcgagaagcgtccttcttcttccaagaaattacacaaacccggatctcttcaattggcgtatttggccgcccaggcggactctcaatgctttcatgccctgcccgccaagatccaacaaaagcttttctcccccgaagaacgtagacggttaaggaacgcttaccgacaaagtctcatctacgacgccgccgacgaagcttaccgccgagattctggtcgagattctagacaatctcgcgcttccaccgacactcactcctcccaggcaaccgtgcctgttgttcagtcatcgaccgccttctattcggattccgagtcggatgacgaagacccaaacatggatcaaacattccatgatagtttccgctggctcgacgaggatggcgatcttgacttatctctcgatgaataccatgctcatgtggcagatgctgccacgagaaagagaatccgtccctccttccgccgctccttatccttttccaaccatcttcgcaaaacattagaaatcacaactatttcggctcggggactcccgcctgtcagccagtcccagccgttaacacccctctccgaccgaagccccgaatcgcctccgtcatccagctcgagcatcgacccctgtgcccaatactatcaagaccccgatgcccgcttgaaattgcgcgtatacctggcatcgccacaaaagtttgacgaagccattgaattcggattcccctctctggatcaaaataataaggagaatgtctccccggaaccaatcacaccgaaatctatctccccgagacccaccctagtcaattcagattttggcacattcttcgaagacgacgatggcaccatggtggggagcccaggatcggtagaaaaagaaccaatcccttcgcccgtgctcaaacagtgggacgcgtcccgaccctccgaatcatcagttctcttgcagcgacgccagtcgtcctggctgcccgggaccaaggcagtcccacaacggcttccgggaaaccgtgagatgactctcaaaatgaccctcactcggccagaccttcgcacctactctcccagccccccgacttcttccacaggaaaagaagaccccttgcgattggctgaacttccgccagcggatcgcagccagtccatatgggactcggaccttgacgagcaaggtatggtgaagaagatgtggcgcaagctccgacgccgagtttgacttggctaaatgtcccgatcgatttcgattgccttccactcgttttatttttaatattccttgattgttctcaacactaagatgttgtttcttcttcttcgtttggcgtgaactcattttcgttctataccattctggactttttttttcaggatatctgattctcgcgtcttgagcgaagttttctttctccacggtgtcctcgacattttcatgtatctatttagcagtgttctgtacatataaccaagctgctttatgtcaattgattcaacataccatcttttccccgttcaccaccttcagggggtttgtagaccaacagactagtcccaattgtatgctctcatccacggttggctgccactagacgtgtttatgggccacggttcagtcgatagggccgataagcacttcacgtgacagcaagcttcatcctaaggccgcagaggccacgcagctccgtcatcatcactatcttaactcacgacttttctacttgcctgtgcatttctcgctgggctctaacaacactctctttttcagcgacttcacattccctcccttaatcgattgaccccgtattcccggtccggtccgctccagctcccaccgcacaccccatcagatgcctaggcagcaccggtcatgatcccacggtggctgctgctcatactgagcctgctgctggtatggacgtcacagccagcagcggcaaagggaaatgaaccgaacgttgtgacccatgaactcaatgctccgcccgccgaccttttctactttcacggcacaaacaccatcctctaccgtgacaagaataccctcaccgcgcatgtctccttcgatggcggagagaaatgggagatcgttaaaggcaaggatggaaccatagagggcgccgtcgagttgatttggagacatccgttcgacgtcaaccgcgcgtacattcttggcgagagtggcaagcactggatcacgaccgaccaggccaaatcgtggaaatccttccaggtggacgtactgccattcgcatcgatgcgctcattcccattggagttcaatggctgggacccgaaaaaagttatattcatgggtctggactgcactatccttggctgcatgccccaggcgttttataccgtcgacgacttcgaaaatgtccaaccgttgcgcgagatgacgctgcagtgtatgtgggctgcgagccgcccgcagttcgcgttggacctagacatgccgaaatcgataggagaccggattctctgcgtggtccctgggttgaaggggccttttgagcatacccgtacagaacgcttgatatattccgataaatttttcaaagacgatgcggatggcaccgagtccaaattggaccacggtaaaccgatgagcggtatcagtcttcaaatccgctccgtgtctaagtatatcgtggcgcgccttcaatcacgcggcacccaggagcaggctttatacgtcagtgacgactcgaatgtgtggcaccgcgcggaatttggcaagcgccgcattgaagaggatgcctatactatcttggaaagcaccaactacagcatccagatcgacgtgcaaactacctggcatgataaccggatgggaagtcttttcacgtccaactccaatggcacctactttacgaagaacatcgagcacacgaacgaggacctgaatggcttggtcgattttgagaaagtcacgggtatccagggtatcacgatcgtcaacacggtcaagaactgggaggaagctgagaattctgatgcaatcaaaaagaagcttatcagcagtattagttttgacgatggaaggacattccagcctctcaaggctgataaagacgagctacacctccattccatgaccacctacgccgctctacacgagatgcccttcccagatcaccggatgttctcaagccccgctccgggcttgaccatgggcgttggtaacactggaggtcatcttgaagactactcggatggtgatctttacgtttcagacaacgcgggtcttacctggcgtcgcgcgctcaagggcccgcaccggtacgagtttggcgaccagggaggtgtgattgcggccgtcttagatggcagcaagacggataaggtccaattttctatcgaccacgggaaagagtgggagtcgattgatctgaagcagaagatcaggcctctgttcctgatctcaacgccggattcgaccagcctcaagttcctgcttgttggcatctccgatgatgacaccaaggtcctcatgttcttcatagacttcgatggcctccacgagcgccagtgtggcaccgatgacctcgaagagtggactgcgcgtttagatgaaaagggcgagccggattgtctgatgggtcaaaagcagttcttctaccgccgcaaggcaaacgcggattgcttcatcaagaaggagtttgccattagcggccctgaattcaaaccctgcaagtgttccgctgaagactttgaatgcgactacaactttgttcgcagcgaggaccgcaaggagtgtctaccagctgtcccgctgacacccccggctggcaagtgcactgagcccagcgataagtacatggggccctctggatggagactcatccccggtaactcatgtatccgcgaaggcggcgagaatctcgaccgccagattgagcgctcctgctcgaatgtcacggggcctgctcccattaccgatggcaaacctcgcgcagaaaagccacagatcatctctgccaaagatacaaactacttctatctcgaacgacaggccagtaacaacggcgttgatgagactatcatgatgctcacagacaaatatgagctgcatatctcgcgtgaccatggccggaactggaagcaggtccacgcggatgagaagtttacggaaatggtcccgcatccttacttcagtgatgcagctttcttcctcaccaacagcaagaaggtgtactacactatcaatcatggcgattctttccacttcttcgaggctcctagtgtgccgaccaaggagaacatccgcgcactcgctttccatgagaagttccaggactcccttatctggattggtcacaaggactgtgaggggaagaactgtcgctcacaggcgtacgtcaccgacaagcgaggcgctagttgggacccgatgcttattggagtcgccgacggcggttgcaactttggatatcacgagggccgcaacaacagtgaaaaactagtgatttgcgagcagtataaagatgaggaaaagaacaataaccgacagctggttatcagtgatgactatttctctactatggacgtcaagtttgagaacatcgcccgttctgctaccaagaacgggttcgtcgtcgtcgcctggtacgaaggagaccagaaggaatacctgaatgccagcgtcagcgtcgacggtcgcacttacgcgaatgtgcacttccctttcaacatcaaggttcctcagtataccgtcctgcctagctctccgcacgcattgttccttcttgtgatggttaacgggggcgatgaacgcagcttcggctctttggtcaagagtaacagtaacggcacctactttgtccagagtctcgaggggctcaacgttaacgaccgcggctacacggactacgatgagttgcaaggcctcgagggcgtggccattgccaatgtggtttcaaatcgggaagaagtgctgagcaagggtgccgccaagaagctacgcactatgattacccacaacgacggtggtcagtggatgcttctggctcccccgagtcaagatgtcgatggcaagaaattcggctgctccgttacggagggcaagggcactgagaaatgcgctctccatttccacggctacacggaacgccgcgattatcgcgacaccctctactcgggctccgccatcggcctgatgctcgcgctcggaaacgtcggtgaacatctcactagcgcagctgaagccgacacatacctcaccagggacggcggcatctcctggacgcaagtcaagaagggacaatatatgtgggaattcggcgcagcaggctcggtaatcgtgctcgtcagcgaccggaaggccaccaaggtcgtacactacacgctcgacgagggcgcgagctggcacgagttccagtttgccgaaaaagaactggtcattgacgatatatccaccgtgccatcagacacatcgaaaaacttcctgctctggggcatggacgagggcaagcgtgtcaccatcacgcttgacttcagcggtatctggagccgcgactgtaacgacgatgagaaagattactataactgggcccccagtcatcccttccaggaagaaaattgtctcttcggccatgtcgaggagtaccaccgcaagagacctactgctgagtgctggaattcctggcgtgagccacatctccacagcatcggccggaactgcacgtgcacccgggctgatttcgaatggtaagcaaaaacacacaatcaccccctcatccaatctaaataccaactaacatgaaacagtgactacaactacgaaatccaatccgacggcagctgcggcctcgtcccaggtctccaaccccaagaccacatcgcacaatgcgcccaagatcccgaaaaggttgaatactgggaacccaccggctaccgtcggattccgcagacaacctgcgaaggcggcctcctactagaccaggacgtgtcaaaaccgtgcccatccaaagaaaaagagtaccaaaagaagcacggcatcagcggaacaggtctattcttcgcgatcgtgacacccatcgtcgccgccgtcgccgtaggctggtacgtgtacacgcactgggacggcaaattcggccagatccggctgggcgataccggcgtcgcatcgcatagctggttatccagggactcggtgctggtcgtggtacctgtggcgattatcgcgggtattgttgcagttgcgcagtctttgccgttacttgttaagagtctggcgcggagcgcgtctggtctgtttggcaggcgtggggcgcagagaccttatgctacgcgtgggtcgtttgcggcgaggagaggggattattcttctgttgttgatgatgaggatgagctgcttggggctgatgattttgacgatgaggaggagcaggcttagactttgacttgagcttaaatttgggcttggattatgagtttgagtatggaattttgatatagctgccttttttgtggtttccgattggaaatgatctttttggggttttgactcttgcgacattatgagcgtgccatgaacctttttgctttctttcttcttcttcttcttcttctttttcttcttgttggtttcggattcggttttcatacgctgtggttgtggcccttggcttttatatacagaaggctctctaggcccgtgggctgtatatcccccattgaacaaaccaaaattcagatttttactagatttcttgaacagaaaccggtaaatggatttaatttcaatggatattagactccgatccaactcctcgccctcttttctgtctctgatatccataaacacatccctatctctatttaagatggtcgggtccgaatgagtcgggcagcaactgggttcattagtacagagaatggaagatgtataaaacagatatatctaaaaaagagaaaagaaactcacctcctccatagtcataactttgtaatttccctcaccgtcgtacatgtatactgggaaagaaggcgaagtaaactcgcgaatactgtatcccaatgagctaggcaaaaaaaaaaggaaaaaaagaggaggaagaaggagactcacaactgcctacacatcccacaaggcgaagcagcaggtttgatatccgtcgcgacagccagagccttgaattccttatggccggcaacctgtgggagttagcaaagatccagacttgggccggttcatataacaaagacagtgataacaaccgaagtagaccaggggaagataacatagaacatacaacagcagtgccaaaagccacgcgctcagcgcatgttccgactggataggcggcattttcgacgttagcgccggcgatgaactcgcccgatgtcgtgaggatgcatgctccgacacggaacttggagtatgggcctgggaaggtgttagttcggtgttgtttgtacttaaaactggatatcgggtgcttatgctgcttcaaagggaaggagggaaagggtcatacagtaggcagttgctttggcgtcaatggccttggtggacagagctgtcagctcctgggttgtgagtgtttgagccattctagttaatgtcaaatagagaggtgttcaaggaagaggggagatgagggggattttatccgctgataggcgataggcgattttccaaggttatgcaacgttgaaggaggagatatggaggtgattggttgttttcagatggttacaatgtacaagatatgagcattcatttctgatgtcaagtgagatgggttcgaatattgctctgatatagaacagttagccctaaatggtatgttgtatgtgctacagtaagaaagttagagaataccacaccgtatcaatacttcagatactacttgatctagcagactagatacacctcatgtcagaattaagcatacattcaacagatattccaattattctacggagatagagtatcttcagatatgggacgttgaatgcccctggacatatggataatgactaagcattgtttccctcctaccccccccccgcttatacgaacatacgatgctctgagctgtaaacagctctagagacaagtcttgtcatcccccaaacatgcccgtaccctttaatctaggcgtccaagtcatcaacggcaaaaagacctttataccactaggtaagctcattcccctgaccagaccaccagtctcacctcaccaatctcaccagtgcaacagagaacaatccagaggtccacgcgcatctatgtaagaaccttggagtatccccgagcctcaccttccatgacgtcctctccaccaccccagaaatgctctcctggatcccacggcccgtgaacgccctcatcctcctctgcgacagacccatctacctcgctgtacggtctcacgtcgaacacagcatacccgagtatctcggcagcggagtcgacgagcccgtgctatggatgaagcagacgatcggacacgcgtgtggactgatggctttgctacacgtggtggtcaatttggagaacgggaaatatgttctggccggatcagagctggagaagatggtaaagcgggcagtcagcctagggccggcggagagggcgcggctcttgtacgattcgaggtttctggaagaagcgcatatggatgcggcgtcggaagggtgctcgattgtgcctttgccgcaggaggaatgcggctttcatttcattgcttttgttaagaaagatggaaaggtttgggaattgaatggaggcatgaatggtcccctattgcgaggtgaattggagggggacttgttggacgacgaagggctggatctgacggtaagggagtttttacatgctgccgacacggaagttcatagggggatgagtattattgcagtgaataatactatgtaacttctgtctttgtgacttctgtctctgtctctatgtctttatgtcttatgccttatgtcttatatcctatacgacttatcatgatattaccatctatcgatgtgacgtcattcatctaaaatccggggtggcctccaaggtttataaaccttggaatcctacttatcattgttgagttgtgcttattcttagcacctacagtttatcatttatactaccctcgaaaagactcgaaaactaactgcaatgaccacaatcctcgtcaccggcgccacaggcaaacagggaggctctgtcatcaacaacctcctagagaaaagtgcccctttcaagatcctcgccgtgacccgtgatgtcaattctgcttcatcgaagaaactcgcccagaagtcttctagtatcacattgatccaaggcaacctcgatgacccggctgccatctttgaggatgtagcgcttcaaacctcggagccagtctggggcgtgttcagcgtccaagtaaatccctgaaacacaatacctcagatataccccgacttaccaataaaataggctgtcaatcccggaaacaccgacgaaagacgccaaggaatggctctcatagacgaatccatcaaacaaggcgtcaagtacttcgtatacagctctgtcgaccgcggtggcgagaaatcagacaaaaacccaacttcagtcccgcatttcattttcaaacacgagatcgagaagcatctcaaggagaaagcaaacgggaccgacatggaatggacaattctccgtccggttgctttcttcgataacctcacgccagattacttcgggaaggtgtttgcaaccgcatggcggatgtatctgaagggcaagccgctgcaggtgatcgcgacgagcgacattggattctttgctgcggcagcattcatgaaccctgaagcttggaagaatcatgccgagtcgcttgctggcgatgaattgacgtttgatcagatgtcggagattttcaagaccttgactggcaataacgtaccgaccacttttgagatgccggtttggttgatgctgtctattgtcagggagatgggtgccatgttcaaatggttccatgatgagggcttcggtgcggatattccggccttgaaaaagttgcaccctggtttgaagacttttggggattggttgaaggaggatagcaaattcgagacacattagtgttggttgttcttgtttggatttcagaggactagttattatgcgaaagaggcctttcgcctcctaccttcgcttgagattggctttgtttgttctggattatatgacaatggtaactgagaaactgagtcaccctgggtgttaaagttggaatgaatttatttgcaatgtttcaattctattctatacaaaaaaataacaagccaagatggcagaaaagctcagattaaataccgttcaccagattcaaatgccgagtagcgagcgagtgagatatccaccagggagtgccatagatgggccatcatcggctagactggagatgcttggcctgacatacatcaagccaggcaagtcttttaggcacaattcgatgcttcacaaatcgagcggaaagcgttaaacaacgcttgattttcaaaagaaacagtaggttaggcatcgagaaggagaagtaaaagtgaaagaaagtgtagaagcaagaatcgtgtttgaatgtatcggggtatagcgcacgatgccaaaatccaaagagttaggtattgaagaattcaaaggaaaaatggggccagcatagtcatcgtccaacctcagttagaccgatagaatagtgacaaatttctatatgcaggggaattgtagcagtctctctgctctctttttttcatccaaaatattgccgtagtccttcataaacagtgaaaataaacgccgagctgggtgctgagcgcgcacaggtgatcccgcacccgcggtacatgcccttgagcccttgctgcctccatagagccttggcctcgccccagaatgaatgtttttgagcatggactggaagtcgtgagacgtctacagtctgcatgcgggactttattgtatcggccgggtagaatagaaagttgtagctcattccagatgttgctcctgcgatcatttgttggtagacggggagcgagtcggaggtcatgtgcgggttcgacttgttatacttgcggaagagcgacgatacgccctcgtatccaccgaaccacgctgcgcttccgccggtttcccggattaaggttcccagttggccccgccagaatcctgccagcccttggtgtcggaagatgcttgcgatgatggccacggggccagcgggtttgaggcctgctgattctgcggggacctgcatcctgcatttcaccagttcaatgggtgtgagtaccagcgaggtgactgagccagatagggctccgctagcaatgagagcggggattggtaggtgctcaacgcctgggtagaccgttgcgcgcagggtatcctggatgagacgatagctgaagaagagacagctggtctccaccgcagctccggccatgggggcactaatgcctctatatagtccccggaagccatcggctcggatagactggcggaaacaatccagtggtcctgcatatcggagaggaaggtgttcggcttgtgactgtagtcggaccttgacggtgtcgaaggggtactcgatgagtttgcctgccattcctgccgacttcggagagtgtcagtctagatcgcccacattcatgtgccaaggacttccttaccgatccaaatataatatcctttatcgcctcaaggccctgattaggcggaagcgatggcagctccatcggttcactgatggtgatcgcatgctccgtcgccgccatcaagtaagatcgggaaaaaagacaaggtaaaagagtgttatcgagggatcatggtaagatgggggaccagaggtataagtagtgaaggaaatggtagtggggggaggggcggtgtaacgagggatttgatgggcttatgaggtgccaagacaccgtgcagaagctaataaggagaaatgaaacgaggacagccctaaacgagcaagaagatggacactgaatgatatagaacagcctgtaagaggaagtcaaacgtggaaagtggacaaaaggtggagtcaggaaaattgggccgaagcaatttctctctttagcggacgccaagacattttatcagatcgagataatcaatgaaaaaactcggtctccgttttgtctcgacgtctcttttgcttcaagtttcttccccccccaatccactttcttgaaacctccacgtggaactggtctttttccaagtcacatattctatcatgtctacctcaacggctacgacatcagttgcgcctccgtctgccggcgtacggaaaaatggtaagtgaaaagaaaaaaaaaaaaataatacgcagtccccacttccctgctctccctcatttccccggctaaccccatcggactttcaggcaaaaactggcatgacaccaagaaggcttttcgtcctactgcgggtttgacctcgtacgctaagcgtcaagagctcaagaagcacaacgatgctgtcaaggaacttgaacgtgagatgaaggaggagcatgaggctgaacgaaaggtatgttgatcttatttcttttctctcttcatctgtctcacttccctttccttttgtatctttgtctggtctctatttcccgtcagcctgtctccataatcatgcgacaacatttcccaagatggtatcactgaccgaagaacccctgtaggcccgtatccagcgcatcaaggaccgccgagaagctaaggaggagaagctacgttacgagaaaatggccgaaaagatgcaccacaagagactcgaccgtctcaagcgcagagagaagcgcaacaagctgctcagctcttaaggccattcacggtcttctctatatctccgccataccatctctccatctcctccaggactgcattgtgtgtatatacatcggcttgttgaggcttcttccttcttccctgtccctggcgggaaagtctgggcactcattctggcgtgggcttaaaaggcgttttttctgaggttaggtcataggtcactactagcgagcaagacgaatgtttttctataatcgcaatatattcggtaacgtaattgttgtgtccagtaatataggtagtaggatggactatactgtcagctgcagagtcgctgatcagtcttcagccttggcgtcatcgatcttcccaactccacactccaacccaaacaccaagcctccaagcttccccaagctttcttctcagaatgtaccaccatggagccttcatataaaaaggcatcattctcaaaatcccgaacagcctccgccacattcccacccacccaaacctccaaccggggcccgagccagaaccagcaagccagcgaccttcaggccaaatcagatgacttctccagattcagtagccaaggaagtcgccaaacagaccgaaaaaagtctcatcgctcgcaccgccatggctccgatgaccgccaaatctccccaaaaggagagcatcgaactggctcatcccctcagcaacaagagccatccaccttcgatggcttgaggtccagccgcaacaaatatcacaagtcgcgggagtcgcgcttccctaatcccatgatccacctggcttcctccgcgagcgcgaggggattgctccatacttggtcgggcgggaaggataaggatcgcgagggcgatgatgggttgttgaggccggttacgagggagacgacccggagtcgatggggatctgagtcgactactggtatgtcagatggtcggaaggggagtctgctcgatacacctggacagcatgagcaattaatgcctttccgccggcacgagattctgtctatggatgacctggagaaggttaagaagcggagaaagctaggcgaggagtatgtgtttttctggcttctttgcgcataggaaatcgactaatggttgttccaaggtatctacggtctgcattgacttcaattgggacgttagcgacagacgtcacccgtcggctagactacacctattacaatctgctcgagaaaatcacagcgctcaactcgactatctcgtcgttccaggaactctccgactcagcatcaacattcctcagtgacttcgaacgtgaaacagtcgaattagaccaggatatccgcaaacagctcaatgacctaaaaggcttcgagccacaggtccgcaaggctgacgcgttagagcaacgcatgaaagtaggccgacagcgcgtcgaagaactaggcaaacgactcgagaccgtacgacacgagatcgatagctgggaacagcgagaaacagaatggcaaacccggactagccgtcgactacgtatcttctggggcattgttacaagtgcgctgttggtgcttgtccttgctctggtcctccagaactggccacaattctggtcttcccacggtgaggcgtcacgtttgacaacgtcaaaccactctttgccctctgtgccacctcagtccgaggtgtgggatcacgttttcggtctcggggaaagaggtttagagtctgatgcagggcttgctcgatatccgtccaaccttgcaaatcgtcgcgagagcctggacaaggctggtccgacttcgacgatccgatcagggcatgatgcagcagctgcggaacgcgatgctatgagtgcgctggatgaattatgaaaaatttttcgctccagatccttgactagatcaattccctgatctgtgcttccgcaggtttctggtttctggtttgtgcttgaattatcttcaatttgtacttttattttatgtttatgtcatgatacccagtccgcaaaggattcgtgttcgtcattataccgggccctcgctcttcttcttcttcttgtcttcaatcagttcgatattagacgcggggattttcttgccgtggacctcgaggagccaatcatgcaggtcatcactgacatcaccctggacggtgatctcctcaacgcccgcaggcgagcgggtcacagaggaacccgtagcaaatttcttgcccaggtcctttgcgatcttcttgttctccaatccgaagacctccaggccgatcacgaccgtcacgtacttgcgcttgttccgctcgacacgtttgatctgaatcttggaagcggccttgcgctcgctatcgcgtgcctcgctggcggcagctttggcctctttcttagcggcgtctttagcggcgcgttcttgtgccgagacggatagggtggagaggttggcattcagggcatctgatagaaagaaacccagtgttaggatgtcggtgtttccctttccgggcttgcggatcgcccgatgcaggtaaagccagtcaagtagcgtgggagcttcgtaccttcagagtatagtttgtcccatagatccgactcgttatctttgagccattcttcgcatttcttagcggtacctccaaactcgcagtactagacaaaagccccgcacgtcagaaacatgtcagatctccaatgagagtatagttcaaaaggcaatgcacgcaggctcggtgggcgcttttcagtggctgggagttatgccacgcacgacgcagccggggtccccagataagagctaagagccagggtccagagcggggaaaaggctgagttttcacttctgggtgactggaaattgggggattttgggaggaactcaaatgtcatacctcggggggtaatgtgcagactatgatcgattccgtcagcgctatattctcaaacgaattggggttgtgttttgcgccacgggggtcctcacctccacagtacacaacatgtctagcctgtacaactggggctgtttctacctcagccatgatgtatgaaaatagtaccgtgggtaaatggtagctatcggcctagacttcttctctgccagaatcaacatagcgggggcggaggggcagttctgccagctacacccggtttggatatcacgtgcaatgacggtcattgattgtcttccttctaccctgctttagtggcagactagtcaatgtggtaatatggtggtgcttaattgctcattattgggccatcttacatgctcagctagaatggttttttttatcttacaccaaatccggattgggacaaacgtcgctcatcagcacgacattacgtatctttgctaatctccccctcggcagctgtctccaggatggggccacatcccttatcccccggttaaccgaaaccggaaaataggcgatgcaggaagaacaactcgataggagccgtttaaggtgcagctgtggttaccaccacgatagcaggccaggcgcgccaattggtgcccccggtttacggtagatccgcaaatggctgataaggatagtcgattgcaatcttgcaactcctgttttgtcttgcatttcatccattcaattgggcagtcaaaaccggtctccgtcagctagctccgttatcaagagacttggaagcgaagctagtggcgaagacaggaaagagtggttacgttacccctgtggatgttagtgctggcgagatgcgtcgagtcaatgcagagaaagtagcattgactctgatactgtcggagccaatgatcggcgtggaatatgacaaacgttaggaggcccgtggggagaccggggtgcgcatcgcactagcgctacagatcaagcctccgcggagaggtggaggtttcgcgaggtgtccagactgggaaacttacgacgttatagcgatcgtttcagttttccatttccaggttcaaacacgaatacaccacggtagcatgcagcaatagacgattatcactggcttgcgatttgcatcaaccatgtcgcctcctgagaattgatgtcgatggctctagccctccaatcatgacggtgctcggtgtatggttgcccagatactctcgatgcaagcgcacagacaaaggcaattctgtgtacgacacctcttttttctctttttttttggtcctttggcatgtttggcgttgtttagctcttatcttgcatattctcgagctgcccgtgcatgggtacaggattaggaaggagttaagttgggactcgcaaattcgagcgaatgcaaaagtcgaagatgtcaatggctgaagagatacgccaccactggaaccccgcgtattcttttataacccccaaaggcattcctattgctttgtactcttggcctcggctagtatctccggtcgatcatggctaatttttcctttaaattgtggtttgacagccaacagggtcctatgtgttactggtacaaaagtaccatgacgggattctagaaaggctagtgcctcggctagtactactgacctggccaaataatcccaaataattcccaaaatcccatccaaactcgtttcgaagtggatcacatcaaaggggtccgactctcttcgaaactaacgtgctcaggccgtgcggatgcatcggcgggctacaggctctaggccgaatggctccgtgaaactccgattatggcgattataggagtagccctggagatagtactttgcatttctatacaattccaactattctatactccgaatactccgaatgcctagtctgtgtatgtactggatagacggagtactgtatattatactctatatcctctatagggtaccctacatactcttcttatatgctccacaggatcgaccgttagacaaggacgcatagcaccttcggtacactaaaaccctcttgcatatctggtggagaagaatgcatcggtctagatgattcagtaatttatgagatgcgtattggatgtgttgtaactacggagtattaagtattctaacagtcgactagctcgtagactaggcccaagtgagactaagacgacgactacagggctagaatagatttaatttcttgtggcaacttctatgttcttttctataattatcaactctgctttatgaatataaacttgttatttgctttttctcttatcccttcccccaaatccccaaatcccccagaatccgggaacagccataatatccaccttggagtttggttccctatcttcacttcttcacttcctcttcctcttcttcttctcttcttctctctcctcccctccccctcttctctcctcctctcctcctcccatccttggggtcttatccccgtggccaattacctggatatgctatatccttgaacggccaatccctccaacttattccctgtgattaattacatcattgaaagaaaatgacggccctgttggcgccccgcgaaactcattcgccattctcggatcctgtgcggtgtcccgctagtcccactacgcagcgatatttcctaaaagatcacgccatccccgcaaaatcacccatgcaagatgaccctcacgcgacggaccccccagtcgcttcaaacctgccctctgtgctcccctcttccaacttcgctcctatcaccgagcaactcgcctatccatctactttaaacaccctcccctcggaaaacgaactcatcctacccgcctacgacacagaatgcttccacaatgccaaagacccagaggatgtcagcgacgtgtcgacagaatcacacccattttcgtggacgtcacagcctccatcggcagatgacaccttaattgaggatgagccatccaggcatgtggactatctttcacatgactggaaggaggaggatatctggtcctcgtggcgttatgtgaccagtcgaaggaacgattatagcaatggagtgagactggagaatgcctcgtggaggacatgggccaaggccaagcacaatctgaagacgatatcgccggaaagcctcaattggtatgtttttgatcttcttaatctttcatcttttgtttatcccgctaacctcgtactaggctcaaggactgcgatgtcacctggctctacgggccattaaaaagttccgtcgaacgtggaacctctccatctccgcctccaagttacttggaaacaccaacctcttatctagatcgaaagccaatcttgaagaagaagaccgcgtccgaggccatccttcagcgatccctgtctcaacatacgttactccaacatgccggagccattctcaaggcccaagaagccgagaacaactgggctcgaccctatttcccaaggtccaacacggacttggaccacttgcatcaccggactggaagctcgacctactctctcggtggcactctcactgcctcgtcagcatctggaatgacatctcccggcgaacggcgccatatccacttcaacgatgaagtcgtgcaatgcatcgcggtcgaagccaagggctacgaggacgattggccggctaccattggagatgagtcatcttccgacgacggcgtagtcttcatgagacaaatctccaaccggtcctccctaagcaaccgcagcactccacgaaacagcttcagcggcgatgggaaaaccatcgcccctctcccttcaaccacgctcaagtatcgtggggatcctccggagctccacactcagacaatccttgaccgatggtcccccattcccacccggacattatcaccaactccctctgtggagaccctacgtccatcaaggccatcagagcccgaggccaactttcttttggatgagtgcgaagatcccagcctggacttcacgggcaattaccccgatcatgatcgtgcatggtttattgaagatactgcatcagaccgcacgccccgattcactgcttcgggcatgatcatgccggaaggcgagaccgagacccccagcagtagtatatatcaccgggtcgtggacactgtgaacacagcccgagacattgctcatgtgatctggaatgtgggctggcgccgctaatcttgatcacaatcttcacgactgacgatggcggctagcccgtcgtacataatggaaaaaggcaggttacaccctgtggcgtttggggggaaagatgagcgtggattggatttggcgcatttcttttgtatagaatcacccgggactgattgtcaggaatcatgtaacgacataatgcataaaataacaaatattgaaacaatcacactgaaaacccagctatataatgtatagatccgcattggggaaattgcgaggttggtttatgataatgtagggggttgacctcgatacaactatttagtcactgttcttgtttcctcccaatcctcaacttcttgatactatatgaaatgttggaatactacttaatctattcatgcttaatagattaaaagatcgacatcaccgagatcaccattcaaattccaattgccccacagtcccccccccctgatctcttcctctccttgaacttctgccgaggtctttcttatgagtttcaaagacatggaaaccgtcaatgtcgccgaattggtcgagcgcctcggtagcgatgaagatgccgtgcgcaaaatggccgtcttcaagctccagagcaacattggagacccgtccttcgccgacatcttcatcgcagagggaggcctggttcgattacgctacttaaccctgaacgcaagcgggaataccctggcatacagtttaaccagtttctcgaggctgctcgatgtcgacaaggggtgggagtgtgttgaccatgagttggttgagcgcgtgagttatgcttgaggcgattgcaatgccctctacctatgttgatgtggtcggattctaatgcgactatcttctagactgtcgagctgatcgtcacccaccccctggtcaacatcctccgcggcgccatgtccattctcgtctctattgtttcccacccgtacatggggaaccgcgcctcccagatcaacaactttggtttccgcgccctgaaacctgcaatcgccatataccctcagttcctggagatgctagtcagccgattatcctccgcggaccatgcgctgtgtgccaatgcgctccaattgataaactcgctcatgcgcgactcgatcacccacgacccggaggcggagtggcccaagtttattcagaggttacaggatctaggcgttatcagagcggtttacgtgcttatgcaggattccgcccttcaggacctggcgcatccgctgttggaattccagtcactcaccaaggtactgctacgcaagtggcgagatatccccgtcaaccaggagacgcctgagcatcgccgtgcgctgaagggaatttatctggccagtaacccggggaaaattcccgacgagcctacggagaatggcgatgatacacggcgctctagacgacatcatccggaaaagtggaggcggcttgggtttgagacggagagtccggccggggaattctacgaggtcggcttcctaggtatgatggatctggcggactatgtccgcagtcatggggaggagtttcagaatatgctcttggagcactctacaaagccagcaggacaacggtgtccgattgctcgagcttcgttggccgtcacatcgatcttatatgagcattttgaggttgaaaagtccgacatggatgactcaaaaacataccttctttcagagtcccgtacgggctttgataagttgttccagcccctgttgttacattggacccgcctacatgttgccggcttacaggccttcttccgcctgtggaaggcgactgccgccgaggaagaggacttggacaagctcattgagctcgtgcgtatcctcattgagtcggtagttggcggagctgctcgaatcaaggatgtccaggatgtcgaagaggaactggccgatttcgaataccaccgcttacgcgggctgcagatggaactccttgaacttacgtacgaggatgcatggggccagcacttgcgacaggtgcgcgaggaacttcatcatgaggctctccaattcgtcaaagagcaacgaatccgatccttgcttcaaggtagctggttcgctctggactcctctaagtcggagtcgggggcggtgcagaagtctagtgctacatatcaatatgcccagctctctcacaaccgacgatacttgcatttcggtcaatttgacctgatgggcgaacaagctccggagttggacaccctaccagagaaaagtgagtgtcaccgagtgctttcccgtaatcacactttttgtatgtgttgctgacaccgaaccgtgccctcaacagtcgatctctcaatggtatcatccgtagtctcgaacgtctccaccagcccagaccattcctccacggctacggtgaagactgcaccccggcaacccgcaaccaagatcaccatccacggctacgcaccctccgcaattaccggacacggaaaaggccacagccacgctcggtccgccagcaggaccactcaaaaggaggtagtcctgctcacgctgcggccatcctcgcagagcattgcgtccgaatggctagatggcctactgatgcttctcaaccagcagcccatcactgcagagacaagcaagctgattgatctaatcagcaattacgggttgaaaatccgcctgctcaatgtgcggtttgacgacgccactttcgcaggtgaggctccccaggtcccttcgagagatggcttggatgaagattactactatgatgtatttggaggcgcatagggggtacttccctctatatatgtgtgtcttttctcttgttgttggggattttggtttctttggctctgccgactcggattctggtcaatatacccgctgtgcgatctgtcttatgaatgtatctatttctaatatataatttaacgttagcaattgcatctgtatctatgtgttcatctcatctcacatctataaatctggcaaaaggcccaccgcttggcgtcataagcttatcggactcgtatctcaatttctccaggtttttgaccaactcatcatggatggcggtcgtcctcctaaaagacaacgcagatctaaggatttaaagcaagatgagccgaaaagacaatcaaaacgaaaagccatcattatatcagatagctccagtcctatcgaaccagcggaacccttcgctctctcctcacgccctaaaccctcctactcgcgcggcacaacaccatcaacccggcttccctcgtcctcaccctctccaatcaaaagaactaaatcaccagcaaagccagactcggactcgaaatcaaagtccctgcacaacttctttccgcccgcgacagagggacagcgatgggcaccacaaaagaccgagaagcaatccctcccgccggtcacggagaccgtcgacgtggacctgattgaggatgattatgactcctacgatgaaatcttcacacagcatctagctaatgagcggatgggtctggcagccatgggctctagccagacacgtcagcctgcgccaaagccagcgccgaagccaaagccaaaggcctcagtcaaaccaccgcggaagacgacgaaacggttccttctgtctacggactctgggaatggaactgcgaaggaggcattggctgcacaaccggctagcgaaccggaccgtcgaccatgggcgcagcggttcgctccggctaatctgggcgaattggccgttcataagaaaaaagtctcggatgtgcagcattggctagaggatgcttttgctgggaggcgtcccgaggtgagtttttgatttgagaataattcgaggttggggttgaatgtcgttctgacagtatgcagaggttactcgtcctacggggtccggcgggcagtgggaagacgaccactatgtccctgctctccgagtcaattggttacgatattgtcgagtggaagaatcccccggtttcggaatttggagctcgcgatcatcaatccgtgagcgcacactttgaagagtttcttggacggggtaataaatttggagggcttgacctcggaaatgccaccgagcccgattctcagaaagacgagaaacctcgggatcagcgaatacttcttatagaggagtttccgactgtgtttggccgggcgtcctccaccctcacggcgtttcggacgtctcttcaacaatatctagctgccgcggcgaatgatcatgcccggggcagttctggatcgaatcacccgcctatagtgataatcgtgtcggagactttgttgagctctgcgtcttcaatctcagataacctgacagttcaccggttactggggcccacaatctataatcaccccgggacaacgatattggatttcaatagcattgcacccacttttatgcacaaggctttacggtctattttggacagagaggcacggaactctaggcgtgtccagataccggggccaggtgttattgacagtatctctgaaatcggcgatatccgcagtgcaatctcctctctcgagttcctctgtctgaaaggggacgaaacgggaagatggggaggcagcgtggccaaaacaaagaaagctcgaggtgaggttgctttgacaccgatggagaaagagtctctcaaattgataactcagagagaggcgagcctgggcatgttccatgccgttgggaagatcatgtacaacaaacgcatggacccgagtctgatcgagggcgatgtcgagatccttccaccgccaccggactatctgcgccactatgcccgaccaaaagcctcgcaggtattggttaatgatctggtagacgagaccgggaccgacatatcaactttcatcagtgctctccatgaaaactacatcccatcctgcgatggggataatttcaccgactctctcaacgactgcatcgatgcactctccgatagcgatatcctcagcgccgaccgccgaccagggcaaggggcgcgcgccgggataggaaccggaatcacctctttcagtagcggtacagacgtgctccggcaggaagaaattagtttccaagttgcggcgcgtggtcttcttttcgcccttccatacccagtcaacagacgggttgggtctggagccggacgaagccgcgctggtgatgccttcaagatgttttacccagcttctctgcggttgtggagagaggccgaggaaatcgatggactgatcgactcgtggatgaaccgaacactcgatcctagacggcagcatctttctcaaaatggctccggcctcacgggggtcagttcctggaaaaatctccaggtgggaaggtcgatatccgccgactcgggaaacaaaaatgacaccccgagtgtggtcacgatgatgccccggcatgatctactgcttcatcagttgccctatatggctgcaatccggcgtcaggacccagattggtggcagttggataagatcaccagcgttcggtccaacgagaatcttcgtaatgatgacattgacgacatagaggagtctccagcttcgcggtcgcgtgggaaacaatccagcagtcgtgggtttggacctcgactgcaactgcccgaagagaaattgattctcagcgatgatgacattgtcgattgagcgtgatatttctgcgtatcatgtctatcatagtaaactatttaatgcgagaacataaacatgtactcagtatgaacaatgtagtcctgtatatactcttcgagactggtttgcatactagattataaccccttgacaatgaagtagttgttgaagcagtttttgataaagtaaagcatagaataagatgtgacgaaagtgacttatttttgctagcagtttacatataaagcgtaggtacctgatacgggagtttggcagaagcggcattagcggtagttacccaactaggaaggtacacctggaaatgcaagtgagtgtctagatcaatgccctatctatatgttgacactatgtaatagagattgttaaagagcttgcttgctgatttctttgttctttgtcacttgctagtttagcaagagattgggatttgcactgtttgcaggactatatctatgggtttcctatttcttgcttctcactcttctctccccatcttgggcctggcttgtcacatcacaccaagtacccttcaatataaacttcaatcgcattagcatgaaggttataaaagctatttacttgcttttatgaaagatacataccaaggcctaaacagggtgaaattctctatttacacttacctatcattcagaagagccaacatactatctaggcagagcttgacgagagatgctagaagcttacagtaccaagaccgagtttctttacttctatagtctcttttctcttacccttacttgaatgcaatatctatagcattcactggggttcatctttgatacagacttgtcgcaggtgaatgagtgcggacacgcttcccggcgcgagcatcctgtataggggtcgccgctttcatgttggccatgggtattcaaactcgacggatatggttcttttccttggtaagactgtcatcgtccggcttagactggtcgatgatacgccgtcttggtttccaacccccggcacgacaagaaggtcccagcaaagattggtaactgcgcggaaacatatccatgagttcatttactcaaagggtacggcgaagagaaccggaatttctacggaatttccctacaatggaaaggcttgcagccagtaagagtgccaggattctcttcgtggggagacatagaagtggcacacccttgtttcaactgccaggaacttctctcggtatagcggatcagcaggaggtcctccttgatatttactcttactttgatacaaagttggtgagctagcgctctagcccagtgattcctaatataaatttcggcctaggcgttgcccttgctatcctttctctcctcctaattaactgcataatatgtcaggggcttgagacagttaggggattaagagtaaaactatatcatagacagcttgaggggggctttacaatggtaaatccggtacatatagttgcatatatatctcgtgatccacaatcttatcttcagccccagctttctttcttttaaccacctcatctcacctttcataggagtcgccctttgaaactcctagaaggtcagaaattcaattcatctctatttgcaattcctctcagtcaatatcgctcacacttgaataggatgctcaatgatcatgaaccctcaaaaggacacgatgactcctacctgatcaatcgcactcgagtctcgactgtgaatcaatcgaatagaaacgcgaacgtcgcttcgcccccaaaatctcgatctcaaaaatccgaggacaagcttgattatgctcaattgaagaaagatgcgccgggcctcgttgctgccgccgcccatgcggcggttcctagctggaccagcatggttctaatggtctctcttatcttcgggggctgctgtgccaatgtgggtgtctagagaaacccccaacgctgctacggagccaaaacaggaactgatcctttacaggtctttgcgctagaggcgattatcaagtaagaaaacaaaccaggctaatccaaacacaacgctaatcctatatcttctccagagaacagcctactgccggtaaggacgacaaccagaaccaatgaaaacaatcgcactgcatatcctaacccaactcgttccacgtacaggtcccttgataacattcgcccaattcgcgatctgcgccattttcaccatcccaaccttcctatccccctcagccggaccacgagctttattcctgcgcccacgcgctattccactacgctcatgggcggtatataccgcttatttcatgagcgtcaacctcctcaacaactgggccttcgcatacaagatctccgtcccactacacataatcctccggtccgcaggccccgtcgcctcaatggtaatcggctacctatacaacggcaagcgctattcccgcggccagatcgcctcggtagcgatgctgacggtgggcgtggcggcagccgccatggccgacgcgcaatccaaaggcgtatctatccacgtcgagtccgatgcggcggatacaatcacgaccgtgacgggcttcacaatcctcgcgctcgcaatggtcctttctgcgttccagggcatctatgccgaccggctgtacgcgacttacggcagagactattggaaagaggcgcttttctactcgcatgcgctttctctgccgcttttcctgacgagttgtccgcagttgctgggtcagtggcgggtggtggcttcgtcgccttctttgctgtcgcatttggattccgggttgtgggggtcgtctggtacggttgggagcactgctttctcggtgctggggcggatttgccacattgaggctgtcaaggctttcctggcgcatctgccggttcaggtggcttatctggcgatgaatgcactgacgcagtatctgtgcatccgaggagtccatcttttgtcggccaagtcgtcatcgttgactgttaccatttttttgaatgttcgcaagttggtttccctgctcctatcgatttacctcttcgggaacaatttggctggaggtgtcttggttggcgcggctttggtgtttgtcgggggtggtttatatggctttgagggtgcacgtctacgaagcgttgccaaaaaggcccagtgatattatcatattagatagatcttgatctaaatgtctagacaaaatgccttttgcgtgagttttctcggttttaccttagagccggttacttctaggagccatgccacgaatagaggaaaaatatatcgatatcatgtgcaggctgcagtagttgtacataaattgagataaagcaacattgtccacaccatttgagtggaaaggtaaggcatcaagcatgacgcaaaatcaagatctcccaggctaccccggagtcagaccaaaataataaaacagttaaccatctataagacctcgcccacaatcttggcggcttccttgtacgtttccaatagccgctcacacttctctctctcggccttgatgccatcatcctcgtagagaagctcgccgaaaagatcttctttataaagttcgctcacgagtctgttttggaccacatccttgcagtggttgacaaggaggtgcatgacagccttggggacttggtctgcaatggtttctcggacgatgttgaagtatgatgagatgagacggcgaatgagctcggtttcgagcatctcacgttccgtgagtgcaggctccgtgttctcgttgggctgtaagagctgaagtcagtcataaccatctaaaatttaaacaacgaatgcgcagtggtacttacgaatacagatatgtcaccaccatactccgacggtgcagtgtatccctcagtcggcataatgggagcccgaacctcggcacgccgaatgctctggctaatgctcggctcaccagcatttggcccttgccggtgggggttcatgcctgccggtggcatggccatgttgtgagtaccttccttaccgaagaagtagttcaggaacgagtcgcgggcattgttcgagccaccgccaccgaacgcagcatggttagattgactgccattcagagaagcagcaatgccattctcgcctgtgcggccaacatgaggagacatgcttcgcgatcccttagaagagtgggttcggacggggaggttttgcttatcagaatattcttcttcttcaggacctcccgtagtcccattgggagctcccaattccttttgacgtcgcttctcacgctttcttttttcctccgctagcaaggcttttctttcttcgtcctgcttgttctgcatgattgaagacatggcagctgcggcaccaaggaagttaggatggttggtgttaatgtaagctctttggatcgagatcaaagattctacataagtcgagcagggccccaggcgctcacgaagaaggtcagatacgacctcaatcaactttccttggagacgagggaaacgcaggagctcttgattgccacacgtgtggcagatcttgataagctcctcatagaccagctccacgcatcgctgactgggtgattcgaggagtttaatctgtggtttgaccagcaaatcaaaggccaactccgggacaaacagactgggacgaggacctgtcgagtttcggatggccgttcggatatcggagacagtcaggttgtgagtgggatcaatggtttccagtgagtttccaaaaacagagttgaaaatgtagtaaatccttgctccaccgcatagctctttcgtagaaatctctgaggaagttccgtcgatagatgagatgaacgacgcggcgaacctggtcatctgctgaagaatcaatgatccccggtgttcttcgccactgaactgtttgtttccgtagctggccaactcttgctgagtctgacccatcaaggtgtttagccgagctttgatatccggaagccggtcacgaatgtgagacatcagggttgtgttcagagtcttggccaaaaagtgcgtaccgcagcggttggccatattccggtaagctggatgatgccggaagaactcagcctctgcccgcaatgcatctgaaagcgattttccacactggatgtcctgctgggaccgattgacaacgccgataaatccaagcttcaagggatacacacgtccagacaggatgtccatcgcattggtgccatggtccatgagatccagctttgacagaacaccgatcgtcctccggcccatgggatccacctgacgggcaagcttcagcgcctcggaattgaccagatcgacattagccggagagaccgcaagaataatgctgttcggcttggcaatatattccaaaatcaaagtgcgtgtttgtttttcaatgtccgacggttgatcaccaatgggcaccttcgtcaatccaggcaaatccacgagcgtgaggttgagcacatgaggtgagaatatcttgaggttgatcggttgtctattgatgcccttgttgcttcctgcgattcttgctgtctccgcttcgatctcttgcttcacttgggcaaagtcatcaaacttgcgtcccggctggtggtggaattcagcccattcgtgttgaccggcaacactggcagccgtgtgtggggtatggacctcatcgttttccggcttatcatcacgttcactgggcacgttgataagttgcaggataaggggccgtcgggtgacaattccgctacctcttggtagaaagtcccttccgacgatattctctaggaccgaagactttccggatgactgggaaccaacaacaacctaagagggaagcggggattagtcttgggttgaccgggtaagaaatgacaattccctctcaacctctgagagctctctacccgactagactcacaatttggggcaagtccaaggaatcattcccaatggtgttgaagaccagatcctgaagcttgttcactgtcacgagcagatcctcgcccagcgatgtcatgatgtcgaattgaaggctggctccttgagacacacaggtaagagttagagcccggagttaagaagagtgaaaaactagtaaaggtacacgcaaagtgaggtcgcgtgcgaacggtcaccgggatccctgaaggcctaagcaactctccttggaaccttggaacattgtttatggccactttttcggcacacgtgatgctgacataagcatgtgctccgatcatgacgtcggtgattcgctggctttaaaacacacatccaggcacgtggatacattgcatacatgttcaaaagaagtaatactacgaggataagatgtggatctagaactacaagacaatgagtcattcaaatgaaccttattgactcattttaattgaaagtggtagtgaactgggtatttatactgaagaaccaaggatacatagtgagatctagtttggcgaatcaatagaaatttgaatttcccctggtcgcattgctggagtcggagtatctacgcatgatccaatcattcgtccaagcgaacatagttggcagggaatagaccttgtttgccattgtactcaccaagccaccagtcgtcatcggggaattcctacaaccgggttagtactgtagatagtgatggggcaaagccgagaaaaacagggattgctccacttaccacgttggagatctttgcatcttcagggaaaccgatctcgttatcctcggcggcttcatagtcatacaaagctgtggccgtgacaccgttggagcttggggtagccactgatggtgcagcggcagcgacaggggtgggtgccgccgggacgggggcagcagcaggctctggctctggctccgcttcataatggtcggaagcggccggtacgtgtgacgcaggttctgtgtcttccacaatctccacatagttggcggggaagagaccacgctcaccctgagtattgacacccacccaccaatcctcgtcgaccatttcaatgtcggtcacatattctccctctcgcaattcaatctcattatcctcggccttctcgtagtcgtactggatttgggctcgcggtccgccttggggctgctcgggctgctgaggagcggttgcctcggccgcagcgcggcctaggtcgtgagaatcatcctcaatttccctctcgtcgggaacggcctcttggaggctccgaacaggcatagcagggggaggggaatattgttcctcgtgtgcatccgcaatactgtcggcagtgccgcggccaaccggcatggcaatctggatcggcgagctctcacgctccggggtgggaggtgtcggggagcgaggaggctgcggtggtggagtaggaagagcctgctgggcgtcatgctcaggctcagactcgacgggtccagaggatagcccgggtacaggaacagggcgactggcctgcggaacaggtggagcaggaggagcgagtggcgcaggcgcgggtgtgggcgtgtcctgagcgaactggtcacgaatagcactcacgtgaggttgtggtttatcctcttgttggtcattggcctttgcatcaacaggttgctcaggatcgtatgatttttcctgtgcagtttgaacgggagcccaggacttgcccgcataggagcttctccactcgctttggccactaggttggctttgaatcggggcaggagtagaggtaggctcagtggttccagatgacggggcgactccgcgctccttggctttacgctctgcccaaatttgagcgggtgtcttgcctccctcatcagcaaaagttcggcttgcagttccaatcggcgcgctcgtggttggcttaggcccgagaccaactgggaggggtggctttgttccagggaaggaggggctagagccaaacttgttggcaacccttggcttgggtagggtggtcaaacgctccgcggcagtagagggcgcaggtcgctcgggcaacgttgttggctgttggttgaatgcagtgctcgatgggacgttgtcattggcttccggcttctgtgctctggctcgaatagcagcgatgtcgactttgccaatgggctcataagagcccttgataattgcggggcgctcatctttcagctgaccagatgcggcagcttgtttccgaattgcagcaatatcgactttacccactggctggtagccacctctaacaacatcgctagaatcatccgatgcagtagcggcaggttggcgactccctgtggggtttgccttgagttcttgtaggttcactctagtgggctggtaagccgattgtaccttttccaattgggtgcgagtcacgggaggggcatctgcaccccatccatcatcattcacaccagctcttgaaggtgtgggcagtacgcgagcagctgggctgggagtgatgcccccagatcgagtcggtgtgaaagcaggcttgctagccacggcaggccggggggctggggcccgggctgaggcctcgcctactgaatacttagagccggaggaatctgccacccgctggacgattccctcgggggttagatccccatctgctcgggctgtgatctgcacatggtatccctatccagccaagtcagtttcaccgcgacagttgcatcaggggaaggaaactcctcacatgaaggaacttggcaactgcagccaggtggctagtaaagtaaccctttgttcgttccggcacaccttctccacaccagccaatgagaacgtttttgggaagaccggtgttggaatccgtcaccttcacataggcgaattgcacccgtccttcggaaaattcctcgatgagatccgccaattcaccctctgcagcacgattggttaatataagataatgggcttggttggtaaaaaggactactaacctccggtgctctggaccttaaggacactctccttacctccatcttgctggaaggcactaacaagcggggtagaaactgagtagacagcccattggccataggtcgcagaccctccgttcccagaagggggtggtgcattcaccactgtctgataactttttgatatcgaagggccattggacgagagattgagagaagccatgactttccggcgaataggcggggagaaggaagggaaagcttgtcaagtttcagatgtgtccacgtgggaggaggggtagctttttcttttgttacaatatctgtatctcatgcagtgtcagcgaaaagcactccagactgttggtgttggggtgggatgtaagttcggggaggggaatagataggagaaggagggagttgacgtaggtgggcatttgtaaacactgaccgggcaaaaaggataaaagcagcggggttgaatgctttcaagatgagaatatcgcgacaccaaagaaaaggataagtacagaatcaagaggaatatagagagaaaggtccaggagaacgatgaagcctaaaggtggagaggagagacgggaggttaggggaaaggtgttataatacgatacttcgtactgccaatacatgcacatgcttcataatatatgcaatgtattatgtactatgtagtatttagggagcatcttcacttcgtagatctatatagctttagaatttaaagcttgaagatgggtattaattctaattcagatattacactctatactctgtatcatatataaaaaatcaatcgtgcaagccttgtatagtcccaaagctatacatacatagttggagatgtgtctattttacgtgtattcttgtgtatgtattttacagctccggggcctggactttcttccccattcttcaccgacagagaggtggggagcttgagctctcgaagagtttttttttcttcttcttcttctctctggtgttctttggtttggagtatcctactttctaattgtgctaatccaattctatactgtccgaaatcgcattgttgaccttgtgtgaaaccccaagttatgcaataatctcatcacaacccttctcagttatacaatccctattcggtacctgggtacacataggatagcaaggggtcacagcagtcatgggacctactcaacccgatttcagtgccagtcagaatgccaacgcgcctgctgattcgtccaacaatgaatcggccacttcatccccgggtctcgaaggtcccgtggactctcctctccacgaaagctctaatgcactagatcagcccgcagaggatattttgcccagagaccaacagcagaaaacggccacctatgactatgcctatgagaagtccatgagtcacgccgaggcaagactcttctatcaacatcatcagctagccgcgcggaacgacaccctgccttcgagcccagtggccccagcccgctcaacattcgaatcacgccttgaagaatcaccgaacctttcggatccaatgaatagtcaaggccagatctctcgcgagggatctatggtgtttgaacacgaacccacaaaactacgattgcaatccgccagtgaacccaatccctctgtgtcacgttacctcgaagacgaccaagacgaggcgaacgattctgcccgaaatcaggcggtgattctagatgctgtccaagggcagggaccatactcggtggcggcggcgagtctgcaaagcgccggtgtggggatcggaggccctcaggttgctagcggatatgcgtctagcagtgatgctgtcacgtctgagctgagtgctatctactgcaaaatcaagaaactacttgatcggcgatcccagtacttggcgctttctttgcagggacccggagatgatcctaaggaccaaccagactgggagatttatcctccgcccccagaaccagcgtgggatcatgagaaggaatatcaccccggcaacatcggtgacccatctgaccttgcaggaaagaagaggaaaatgggccaagatattggggaggattttgacatggaagaattgatgcctctacccaaagaatcgccttggacgtataggctggatggcaacagtgtatatcaggtctttgattctgaaactgctgctgaccaacaaacacctattgttcagatcccctcgttgcgcgatttctatatggatctggacgccgtgatcgatgtgtcgaccgacggacctgcgaagagctttgcgttcaagcggctgtcgtacttggagggcaaattccaactgtatacgctgctcaatgaataccaggagatggccgacagcaagaaggttcctcacagggacttttacaacgtgcgtaaagtggatacccacgttcatcattcggcatgcatgaaccagaaacatcttcttcgcttcatcaagagcaagatgagaaagtccccggacgaagttgtccttttccgagacggaaaacatctgaccttgagagaggtctttgagagtattaacctgactgcctatgacttgagtattgatactttggatatgcacgtaagtctctcatcgcatcccttgttttgatgccgaatctttagaggatgaaggaagatgcagcctagatgcatcaacatttcctctacgctcactcttaagctacaggttttacttttactgactctgacttcgtaggcacacaccgactctttccaccgatttgacaaattcaatttgaagtataatcccgttggagaatctcgactgcgtgaaatcttcctcaaaacagacaattacatcaaaggtcgctacctcgcagagatcaccaaggaagtaatctcagacttagaatctagcaaataccaaatggtggaatggcgaatctcgatctacggtcgttcccttcaggaatgggataagcttgcggcctgggtagtggacaacaagttgttctcgcctaatgttcgctggctcattcaagtgcctcgtctctatgatgtgtacaaatcaagcggcatgatggagaactatgaacaagttatcaccaatgtcttccaaccgctgttcgaagtgaccaaagatccttctagtcatcctaaactccacgtcttcctccagcgagtggtgggattcgacagtgtggatgatgaaagtaagcccgagcgccggctgtacagaaagtaccccatcccccgggagtggaacaccaagcagaatccgccttacacttactggttgtatttcatgttcgccaacatcgcttccctcaacaactggcggaaacgccgaggattcaacacgttcgttctacgccctcattgtggagaggcaggcgacccggatcatctggccgtcggcttcctctgctgccacagcatcagtcatggtatcttgctacgcaaggtacccctcctgcaatatctttactatctggatcagatcggcattgccatgtcaccactcagtaacaacgctttgttccttacatacgataagaacccctgcgcgacctttttcaagcgaggactcaatgtgtctttgtctaccgatgatccattgcagtttgcattcacaaaggagcctctcattgaggaatactcagttgcagcgcagatctacaaattcagcgcagtcgacatgtgcgaactcgccaaacattcagtcgaccaaagtggatttgagctttccctcaaagaaagatggctcggcgcgaattgttccctgcctggagtcgctggcaataatgttgcaaagagcaacgtaccagatattcgtgaggcattccgacatgaaacattgctgggagaatggtccttgtaagttgcctatcgtgcctttgacgtcaaagaaatgagactaactgtatatcgtctcatcaggatcgagcgatatgccgacggcaatgggaccggagaacagaagagcttggttccaggtccaccaggggaatcggtgtcctcgaatcatggtaaatctatcttaaggaattaggaattatgcggccgactgactttgaaattcttagatcacaatgcacctaaccctgagccgcaatctgagctaagttcaagtgtagctgacactactgatgcctcactcagtgaggcccatggtacagaccagacaaccaccgctccgtcgactccatcgacatatgtagctcgatcacctcgccttggaacgggtgagttctcgtctcctggcagtggaacaggagtcgggggatcagacggtctgccagaacagaagattttcccaggaatcgttcatgagagggctcgaaaggggactatgcaataggattacacgtgagcggctttacgtgacacatcacagactaaggggagagaacaaaatattggggtaattctaatgcaaattggctcctctatcggtcaagttaagaattcaagtgaccgtgacccggtagtagagtaccacgggcatgctacacatgtaaaatgccgacctctatcaaaaacccaagaacgcctgaagaaacagccacgaattcaacatgcaccacacgcacctcacgcacccgtttatgtcaatcaaacaccaatgcacgcctctcaaccgtaacatacaaattagatgtttcaagtacgtacttcaaatagcccagctgccctttcgttctggcattccccagccttcaggattgggatcttctccagtcataccaggctcctgcctcgcccattcccggatgtatagacggagcgctttccatcgtgcacaggcattcgcaagatcatccttgtctggggctgcaacatagcctttagcatcagttttcaagtcgtcccgacgaagagcctcgacgggaatacccgagattttgctgagttcgtaatcataataacgcgcaagacaagggtaacccagagacaagtaattataaatttgagtcacaaatccatcatgaaattcggactcgatgactttctggagattaggactcgtgggcttccagggactctgatttctgggcgaggttgcgagatgattcagatgtgtatgtgaaggagatgggctgagtcccatgctaatgccagactcatcgatacgaggcatgggggtcacaattccggggaacagaccgtgcccctcccgctcttggccctcgtctttgcaacaagtacccatccaaagaccagaaccctttccgccgtcccgaggaggcgatgcgtaccataagtcaccacagccagcacaaagatcatgtacacgagaaatcgcatcgaggctaaagtggtcacatattgttccctcgggtgaggcgcatcgaggaaggacgatgtccctgccaagcatgggcgggctcttgccattcttattgagttgtgatgaagattttcgttttccagatgcagccatagcccggatcctcatttcagcctcctccttgtggtggcgcatgtagtccagttcccaagacagatccgccgaagattgtcgtcgggacttgacatgatcataattaggcatatgacaatcgccggaatctccactatcttcctcgatggcgaaatgatcaacaggctcgtagacttgctcgttgggaaaggcagccaacgcttgctccttcaactggatatgtgcggattgagcggcaagagagagcaagaattccgaaacctccccattgggagttgcacggagtggcttgcttgtgcataaatctcgtgtaactttatgggaaggcccgggcggggaagtgcacgttgaatgcgatctggagttgtccgaatcttcgctgctgtcagaggggatcgatggaagatccggaactcgaaacgagtgtctgcgagcttgatgtcggcgcagaagattggaagaagaaaactgagattcggatggcagataagtgaggacatgggtatttatatctgaccatgatgttgtgtctggggaaatgattgtatggggtgctggagatcctacggcgttatgccgtttgggaaacgggacaggttcgctctttcgaacggagcgggtctcagtttgtatcaattcgggtttgaatcttcttggagccgttgatgtctgctcagacgacatagagttcctctcatctacctcagaagtcgaataagaccgtctcttactagtcttgcttgtttcaattggctcaggtaaaaatcttctggtcggttgatgtttactagggtcgtttgaatgtgtttctggctttgatggagcgggttgatttactccactcaaagctggctgctggacgttggagcttcgtgatacggtctcgattggctggggtaggaatctccgagggacccttggttgtccttgacattgtgcaagaccagattcttgtggctggtatcgactatccaaagaatttggctggtccccgtgaagagtaatcatatctcgagcgttgtctgtaagttgactcgcctctcttccatcctccgtgggcatgttagatttcccatgtgcttctggtggatggcccattatcttatcctcagtatctcagctctgaaccatgctcgtattgaatcaagatggttgacagagcataaccattttagggggttcaattaaggcacactgggtgtgtgttatcagtgggtttattgacgggcatgcggggtcgaaagagcggtctcgatgtgactagtagagaaacgaaaagaggcgtaacggaatgtaatgtatcagttatcatggatcgatcaaagaggcaaagtaacccgaatatgttcagaatgtacagtgtatcagaaatgcattttgtaaaagaagggaagtgcacatgtgagaagtggaaagttgtggtaaattccatacaaaacagggcacgtgcaagtaagttctcggccgcgggtaccttttatgacatcagctcttccagggttggctgttacgagattaccatacgcgataagggggcgataagataaaagtcatgaatgtcctcttcgatttcttttcctatgtctagtacagcaatggaatccacagacaagcggaagtttgacgagactacagatgattctcaacctggatcggtcgcgaagcagcggaaggtaatcggaccttctctcccgccacctcaggaggccgacgcggcgagtgaaactagcagagatgatgatgatgacgacgacgatgatttcggtccaagccttcctccctccggtccagtgagctctgtgcgacaagagtccacggctcctgatatatctaaatcggcggaaaaggaaaaggaaaaccagcgagatcaatggatgctgcaacctccttcccattccgactggtcttctaaggtcgaccctacacaactacgaagtcgcaagttcaatacaggcaaatcagccacggcatctaaggatctagattcctcgtgggttgagactccagaggagcgaatgaggcgactacaggatgcagtcatgggcgttgctgcttcaaaaaaacagcccggggactacaaaggtccttcaaacgcaaagatgatggaggatcaaatcaagaaatacaaggtaattattgggatatactttcctcggaaatttcatactttattctctccgcgttcttcattttgttctaacatacgtcttgtaggagatgaccgggaagaccactcgcctagaaacccaagctcaggcaccggaagaagaggatgatccaagtgcgcgcgcatttgaccgagagaaggatatggcagttgcttcgaagatatccagcgcgcagcgccgggagatggtcaagaaggcagcagattacaacacacgttttacaaagggcagcttcttatagccatatttcttgtttatagtttgaatacccaagactttaggaaagattacaaaaaaagacaggccgcttatgcggcagaccattttcatcactaaattatgcatatctttcatacggagaacggagaactctgcgatctaatcttcgcccggttatccggctgactcggagtggccaaagtgcgggttgtgtcaaccaatcaacgtcgctgatattcaccttagttatcctcctccctaattcccttaaattccacctctggatattccgttgttcctactcatctgtcgtctgtctttctctcaaccatgtctttctcaaatctggtctccgatattgccttccgtgatgctcgtgtggatgatggcagctcccaaatctcccatgcccgatctcagatgtctcgtgcgaccgctcggtcgtatgccagcaccgcagccacaagcataagcatttctggcgaagtctctagccagctacatgctggctacagtcatcctctgaccagagcatggcaggccgataggcaattaacaaaggtccgccctcaatgatgttatgaaatccataatatgacacacttaatcgcactggcaactcgtcgctaatacattatctctgcaggatatgcttatctatcccttgttcgtcacggacaacccggatgaggagacatcgattccttcgttgcccaatcaacatcgtcgtggaatcaatcgcctggttcctttccttgccccccttgttagaaaggggctgcgctcgataatgctgtttggcgttccgctccacccgtccgccaaagatgcactgggaaccgccgcagatgaccccgatggtcctgtgattaaagccattcgtcttctccgatctcgtttccctcagctttatatcacagccgatgtgtgcctttgcgagtacacatcgcacggtcactgtggtatcctacgagaggatggaaccctcgacaatgggcaatccgttgaccggatttccgatgtagctgttgcctacgcggcagccggagctcactgcgtcgctccatcagacatgaacgacggaagaatccgagcgatcaagctcaagttgattgaagccggtttagcccaccgtgtacttttgatgtcttacagtgccaaattcagcggctgcttatatggaccgttccgcgacgcggctggctcctgcccctcattcggagatcgccggtgctaccagcttcctccgggcggccgcggtcttgcccgacgtgcgatacagagagacatggccgagggtgcagatattatcatggtaaagccagccagcagttaccttgatatcatccgggatgccaaagatttggcacacgatcttccagtggccgcctaccaggtcagtggtgaatttgcaatgattcatgccgctgccaaggccggtgtcttcaatctcaaggacatggccttcgagagcaccgaaggcatattgagagcaggcgccgggatcgtgatcacttatttcgtcccggaattcctcgactggctttagttgtttattcaacttgattttaactgctacatttctccactccaaaagtgcgattttcgggcctcatattttccgtgcgattaccatgactgcatttctacatctgacatctatctatggtgggtctgatgtattgaatatacaatgctacttgaaaactggatagattccccttacgcgatatgatgttttcttttctgtgtgttaacgattaccctttattacaatgttattaatttcttctttttcggtgcaaccggcctcgggatagtgtagcagatgtttgatttccaatcgacattaaaatatgtagcagaatcgagattggattgaggtaaacaggctaaataatgcagaaacattgtgtataaactgcaagatgaccccgattcgccgcacagaacgctaataccatacaaattaaacggaaaccattcgtcagggacagtggatatcgaaatcaaagacaagatcagtaagaaagagacgaaataaataaaatcgaaccggaggaagaaatccatgcgagtcataattttgctctcccacatataggcgtgagtagaccagcaccgtagcgtaaggtaattggacatttatacacaaatcaaaaacacgtcacttcgttcacatagcaaagctgggttttgacccctgaaacatgtaacctgcaatgttcgtgttgacaatctctcccggggcgacgtaaaccccacgagcaagacgaactccggggtagatgatgcagcccgcgcccacatagcaatcttcttcgatgatgacctgacggccttggtaccgactttgcgagcctttgcgctcttgcatgttgggatgagcggttgaactaattattttgacgttggggcctatccacgtatgggcaccgatgcggataacacagtcatccacaaacaggcaattctccgagatcatgacatcttccccgatatgaatattataaccataatggcaactaaacggagcttcgacgacggccccttggccgatagacccggcagagcgaggcgcgttgcttccggctgggggattgacaatggaagatgccgggggtacgatgatctccttcagcaggcggttttgctctttcacactgacgccggtgagcggattgcaggcgttgttgaatttccacagtgcgcctcggcaacgatctctttcctccacgaggtggacgtcaaagggtcggtagagtttgccgttgatcatcttttccttctcggtctcatcgctcgggacggtacggcccgagagctgatgctcgatgctgagtgccatccgagcctgcgcctgcggactatgggtgtccacagttgccgcgggcaatgttcgctgctcattttggaacaagggcatattggatttaggatgagatggatgactgaggtctcgaagtgaggacatgaccggatagtcaggtttgggacgtccctcccgcgatagctcatggatgggtgggacttcccggtaatcgacgacttttgctatggattcggatggataagcggggagaccggcattggacccggaccccgggccggcgcctggccaagcttgttttgaccacgcatggttggatggtgtatgcgttgggctggtgttgtattgttgaacagggcggtcattatcctccaccactagaggcctgattttggtcgcgtcgacatgttccactaagttgggttgtcgctcttgctgtcggggtacttcttgcatatacaagccattgatgtctgaatagccttctttggattgcaaagggatcggggtttttgtactagatggcttttgccaggtgcttcgggatgaatagccttcacacaggaagccgccacgaagacagttgttgcctacaatgcatcattaatgtcgctctttcggtagaatttggacagggaataatttgtacagaaaagaacgtgggaattagagccattaggagttgacttacatgccggatgttgctcgtcgcatttcttttttctgcgacggcaggtcatacagcccgtcttcgttcggttactaaatacccgcttcctctttggagccacctgcattgccccatgtcgatctggtgcataactaggagaggatggcagctgagcgcccggggtcgagcgatttgtcatagatctttcctgacctgtctcgcgttgaagagcgtctgctaggtgggcatccgatgcatccatttgctgggcccgttgggcctgggtgatcagctgagaatcatattctgaccaaggactattggcggaggtctggcccgcatcattgccctcggaccggtgagatggggttgccgaatgattaccacgctccatctccgaggtcgatcctggcacgctgccattcggattggtttggttgctctcggcaggacgggtcaccggactcctggaggcgttcacggaatctcgtcctcgggactctgatctctttctcttattcttgttgtgagagccactgggggaagatctttgtgaccacttctcttggtcattggcaggatcatcccggtcatcgcggtgactaggatctgaggtggtcttttcttgggtcggcgcacgttctccattggggacggaactgggaggtggaccattcccatttccatttccatttccattttcattcccatttgcattgacaggagccaccgtttctctgccattaactgcagtaaatcgggatgggctgtgttccgtccccgtttcggccccagagtcgtgagtaccagtcatgacggatgcagcaagagccgtcattgtataagccaagaaccagaaaggagaaacccgagaccacgaagaacagggctgaggttacaccgagaggtgtaagaaactattcaagtaaagggcggatataggcaagagttgtagctcaattgccaagcaatcgcccccaaatatgagggatagtctcaacacgcagagacccaaagctttcaaggttcctcaaatacttccaatatcttaatcaacagctctgtgttggggttgtttgcgcggaattgcaagttaagtcacccgcgggtggggcgaggagatcgggagattatcagagatagtatacaagatgggttgaaaaaaagagcattcaaccaagtggctttttttaatagaaagagagataaaagaaaggatatcaatgagaaagaagtagccaagggctcaaatatatagagtagacagagagagagagataggtagagagagagaaagccaaaggtgaaggaagagacggaaaatgggggagacgagggaggggggaaagagactaataaaagagaatggggaaaacaccgagctaggaccctctcactctctcactctctctctctctctggcaagaaaagtacaaataaataataaataataaaaaagagtaatctccaataacttgacagcaaaaaagagggaaaggggaagttggcgcgcgatcggcaatgacggcgtcacacgcagcaccaatcggagaagcgatcagccgtgtcctagtgaggcgcgggtctgagacatggcccatccgctttggactcttttctgcgcgcgttcccagtctcttcccctctccgatttcttttttgcccacattcgccattgccgcccgtgtacgcggtgtcccgcgtataagggcggttatgcgcttagggagacgtcgacttttggtgccttttttgagatggatttaatggcaccgtggtattgaattttcgccttgaaataatattctgttccttccccctaattcttcccaacacccgagtttttcaaggacctggcgcccatctcgggaattattgatgactgcagcgtgccgcggcgctaggaccaaatcactagaggagtcggctgagcacggatacctcatgggcgctttgagtgagtttacttttctttgttttaatcccaacttcatattctggacggcgtacggggtatactttcatctattattataccgattcgcagcatacggagtatacggagtatatgggatatgtctatagatattatacattaggtgtgtataaattgttggcacctgattcagcccaactctcagaatcccatcactatcactatcacttttcgcataaaagcacctgtcataaatataaaaaataataaatatccaatgtgatatcagtgcagtgtacagtcgttggccggtgattatactgggtaaatgatccctgggcggtatccccgggcggtgggggatcgcatgctgactaagatctcaacagagggatcaagttcaaacatccaacgcgctctcaccgccagagtctacgatagcttccttttttgacccccaattttcctgcctgttttttttactgccttcagagtctggtaagtcttgacctggattcacctcctctagtcccccgtccaatcatttctcatcctgacatcgtgctgatcccccaacccctccaaaggatctctaccccaccgaacacacttgcttcttattcccctctatcatttgatactgccctgcagccgccctggcaataccataacctgtccaggcggttcccatcatcctcccctcttgactctcgtgtctcaaaccctattccgtcatcagaggcgatatcgccagtctgcgccgagatgtcgatttcggtacaagagctggacaacacggtccgagctttgtttgaaggcaaaggtgccgtggtaagtcgaacctgtctcctctacacggcttgggtcgcagaattcatggaatctgtgtatcctccgtggagctctggggacaccaacactgacattgagaaccgtctagcaaaaccaagcacagcagactttgacagaagtaagcgcatagcccctccacaacgtcatatgaattgaacactaataatccctgtgctattagttcaagcaaaatcccgatgcctgggtcaccgtgggcaacatcctccaagaggcttcataccttcaaaccaaatgtgtgtcttgagtctttggcaatctcccttgtgcctggaaatgcctgggaaacacttgctgattttcacagacattgctctccaagtcttagacaatgtgattatgacccgatggaaggttctaccaagagaccaatgtcagggtaagaactacatgcattgacctcgtcgttttacctccccatactaagaacgttcttcataggtatccgcaattttattgtgcgattcattctcgaaaactccgaatccgaagagaagatccaagcggagcgccctctgttgaacaagctcaatctcgttcttgtctccattttgaagcaagaatggccgcacaactggcccaccttcatcaatgagattatttcctcttgccatgccagcctttcgatctgtgaaaacaacatgacaattctccgtctgttgtcggaagaagtcttcgatttctcgcaagaccaaatgacctctgccaaggcacggaacttaaagacctctatgacctcggaatttgcatcgatcttccaattgtgctccgaggttctcagcactgccaaccagcccagtctggtgaaagcgaccctcgaaactctccttcgatttctgaactggatcccgttgggctacattttcgaaacccccatcatcaataccctcctcacccgattcctaggagaacccgagttccgaaatgtgactttgaagtgtctgactgagattggtggcttgcaaattggcgctccttacaactatgacgaacgattggtgcacatgttcaccgagaccctgaccaccgtttccaatgtcattcctctgtccttggacctgaagcagacgtatgccatgagcaatggacgagaccaagagtttgtatcaaacttggccttgttcctctcgagctttttcagtgctcaccttgatgtatgctcccttttcctttaaccatgtttttttagtctgtttgatgctaaccttttccttcttttatagcttatcgaaaagttgcctaatcaagattacctcacgcacgcacatttctatctgattcgggtcagccagatcgacgatcgggaggtgttcaagatttgcttggactactggacaagactcgtgcaggaactttacgaagagatgcagcagctcccaatcaccgacatcaacccgctggtctctatgagcgttagtggtttggcgaacggtggtgcccccaatcctacgaccctagcgaactacccattgcgcaagcacaagtacgagactgtgttaacaaaccttcgcaccgtgatgatcgagaagatggtccgcccagaggaggtcttggttgtggaaaacgatgagggtgaaattgtgcgcgagttcgttaaggagagtgataccatccaactttacaagacgatacgcgagtgcttggtctacctgacccatcttgatgtggtcgatacggagactatcatggtggataaattggctaagcaagttgatggaaccgaatggtcttgggtgaactgcaacacgctatgctgggctattggttcgatctctggagccatgaacgaggaaaccgagaaacgtttcctggttaccgtaatcaaggatttgcttggcctcacagagcagaagcgcgggaaggacaacaaagctgtggtggcgagtaacatcatgtacatcgtgggacaatacccccggttcttgaaggctcactggaagttcctgaagacggtcgtcaacaagttgttcgagtttatgcacgagacgcacgaaggtgtccaggatatggcttgcgatacgttcatcaagattgccaacaagtgcagacgccatttcgtggcacttcaacctggtgaaagtgaacctttcatcgaagaaattgtacggaacatgaggaagatcaccatggacctttccccgcaacagattcataccttctacgaagcttgtggctacatgatttcggctcaaggtcaaaagggtctccaagaccgattgactgaaaacttgatggcgctccctaacaccgcctgggatcagattatcgcggaggcaaaccaaaacccggcgattctccaagacgccaacaccatcaagattgtcggaaacatcatgaagactaatgtcgcagcttgctcctcgattgggacctacttttattctcaaattggtcggatctatcacgacatgttgaatatgtaccgtgctgccagtcagctgattaatgatgctgttgcaagtgatggtaactaatccaattcacgctgacggacaccgaatttcttactgacacaaaaataggagctattgcacccaaaacccccaaggtccgaggacttcggaccatcaagaaagagatcttgaagctcattgacacctacgtggacaagtcagatgaccttgagatggtcaatgccagcatggtaccgccgctcatggaggctgtactgatcgattatgcccggaacgtccccgatgcacgcgaggctgaggtcttgaatgccatgactacgatcatccacaaacttcacgtatgtttttcgccctgctgattattggtgcccttatttgatagcctgctaacatgtcaatcagaatctgatggaggataagattccagccatcatggacagcgttttcaactgcactcttgagatgatcaacaaggacttccacgaatatcctgagcaccgggtcgagttcttcaaattgcttcaagctgtcaacctgtactgcttccaagcacttctgaagctcgatgctgcgcagttcaagtttgtcattgattcatgcatgtgggcgtcgaagcatgacaaccgcgaggtggagaacactggccttacgatgtgtttggagctgatgaacaacatggccgaaactgaccagcaaacctcgagcattttcttccgcgagttttacattccaattcttcaggatgtcttctttgtcctcacggatagtgaccacaaggctggtaagtaatgtcctttgtccggatatgaagcaagaagctaacaatccgattttttaggattcaaatcccaggccatgcttttgtcgcgcatgttctactttgtggaatcaggcaaaatccagcagcctatctactcccccgagcaagccccgcctggaacttcaaacaaagaatttttgcaggagcacatcgcaaatctgctacacaatgcattcggcaatctccaagagtaagctccctcggcgtcggttgaaaccatgcaagagtatactaactttctccaccagagcacaaatcaagcagtttgttattgggctgtttttatacactgatgacctaaacaaattcaagactcaccttcgtgatttcttgatttctctgaaagagttttccgatgacaacgcggagctgtatgcggaagaacgagaacaggcggtgcgtgatgcccaggttgccgagcgtgaccgagctatgaaggtcggagggctgttgaagccatcggagatggatcaggaggatgagctatgactggacgaagaactgcgtaccgaatttgttgttgcctctactggttcccctgggcatgagcaagaatcaaggttgacctctcagaacgacagccttgacggctggtccttctacgagctctagctcatgggaagttatgtgccgctacaacaaaggaagcattgctctggaaagatgtgtgtgaatctattcttttatcttttctttttatcccccttggttggctatcgggcatgcgagagaccccttccctgtctgagcgggttctttgaggttggtgcatcaacacggaacggatttacccattttgtcctacgtgttctctgcctattcaggcgcgagcttgtttgatagcttttaacgttaaatgattaaaaaaaatctccaatcaaaagatacaagaataattggccgcttgtggccttgtcatctctttatggtagttagagtttgtttaggtatcttccttctctgatctatagctagacgatgaaaaaggcgaaaatgactgtaaaccgtacagacatttctagtataagccgggacatactggaaccgtcgcttcctacgcgacatatcgtacgttaatgtggggagatcggaaggcggtgaatccttatcagttgcatcatcagaaaaagtagcccccgggccgccttcgcggtgattctattctacgattctttgattccttgactctctaagccacatcactctattccatccccatcacaatgtctcgaacacgccagccaattgcttcaaattcattccaaaccacgacagagtcctcagactcctcaacagcccacttccccccaaccctcaggctacgagccgaggaagcaactgacaccagcgaagcaacatcgtcatcccggcgaatccgatggagcgaagatgtcatagacaacgagggcatgggcaaaaagagctcaaaaggtaaggatatcatacatctacatctattccatctacccgcaatgactccccaaaaccaccagcaacaatctaaccgccaccagtatgctgcatctaccacaaagcccgcccagtgggagaaagtagctcagaagagtcctcatccagctcatccgaaagcgagagcgagagtgaagacgaccgtcgcactgccagagtcaaccgggctcgccgcgcacacccacactccggagaccgggaaccgcacgacgagcacgaagggtgttgtcctgaggaccacggctcaaaaccgaaacgcagtcgcaggaagccgagtccgaatgcatacgagaagatgcctaagccgtcgaagagccagagtcagaatcagaatgagaaccaggcgcggggtacttgatctttattttatgggggggtggctttttgattggcaaggaaatgcaatgcgtgataaggcggaactgggaaatgcctggggattcttggttgggtttggtttgggtgcccgatgcacggccagacgaatcatctagggttgtatttcgccatgtctatgcgcggtgtgtatgacatttgcacgacgctgggacggagacaccccatccggtcggtggcatgcaggaaaatgtacaatggcatgatcgaagagtcaagggaggacatgccgaatccatttccggcgcgccgcattgggcgtggcgggtgaatggtcactgcaagaactacttggtctacttgaaacagatagagggaattgggtagacaagttaatgaaatttgtattaagaagatgtggaacgcagtgagggggtatctgaaacatagctgcagcccggtccgggctataatgattgtactccgtacataggcaaaggataaagaaatcctgttccgaaacgctaaagtggactttataccatcatgctttttctccttgcagcaacacgctggccacgtctgacatcgctgtccattgtagaaccgtttggccccggtccaaatgagtcttcatcttctggagagtcgccgtttggggattgtggttcaccctggtccgtgtcgtattgtgccatgtctgcagttgtatttttggggtttgacgagtgacgtcgaggctgacgcctcgaattcaatggtttttgtgatacttgggccgagatatctgcgaggctatcctcaatctctttcttgaggccagagcttggtttccccacatcggggtcgtcctttggggctgacgacgccttgcgttttctccgggagaccattgctagcaactgatctgaggattcatccacggtaaacagatctgagctctgcgccgcaagagtgaaatcagcagggagagtaccatgagactgggtgttgccgccctctccgtccaaactttcccggcctgcctggaaactggaggatcttcgcgatccaagtgcaacagcatcgatcatttccttcgtagggcggcgcatcttgtcccgtaggttaggctctgcatagctaaccacagcaccacgacgtcgtgaatgccgagtggcagactcttcctccgtcttcattgtattcggatgcggtgactgttctggctggcgtgaggcaggctcttccacctggggaggagcagggcgagcgcgcttttctttgtttgaagaggcgcttctggacactcgcggcttttgattgacagtgttaccactgagtttgtcgacattcttaactttctgtggcgagttgctattctcgtcgcccttggtgggcctttgcataagcttagagtcctggtacgaagacatgcgggccttcttcggagagcctagattggaatttgcactctctgttctaattgttagctacactcattgtagagatgagaaagtagaacatacttggctcgaggaccctccgcatagatagaacgggggttcttgatcctcttgttagtttgacatggctttgagtgggtgactggtctcgctgtgtatcttcgaatgggatcgtttgcttttttggggtatggctgggccgggtgaattggaattcgtcgtcgtcgacatcaaggttggaagtgaacctgtcatcgtcttcgggtacgtattttcgcttcgttgaaaccgatgttgtgtgctgtgttgtatcgatgggtggacttggttgccgatctgttggcggggggctaatttcaggcgcaacgatcgaactcgacctctttttcttcttgcgtgtctcgagagttggaggaaatgatggctcgggttcttcgggtatatcgttgtttatttcggtcctgaatgttgattctggtggtgatgggcttgaattttcgatgagtgcatccccttcctccggcataaagctgaatcgaggaggggagtctagaatactttggtcgtcttggagcaggctgtcaagctcttggggcctgaataagatgttagcaatttggaatgacccaaaatctcgaagattcttactccagagtccgtcgagggtaatatttgtcctcaacaatggcaggaagccttccatcttcgccttccatgtcttctgtcctaggtctcgactctgccgcctgttttggtctatcgaactgtgtgtcgcagagcttgcccaccttgcggggtaatgagcccaaatctgcggccaaattgctcaactcggctagtttggcatctagcttggatttgatgtcgtatattccattgtgcaacattttccccgcttccagtcgttcggtttcccgggtaagattgatgacctgttttcgaagcgacacattttccgaaattagatgtgatacttctgactctaggctgcgaatacgaagagattgcaaggaattcactctcgcgatctcccgattttgtcgcacaaatcgtcgcttcactggatagaaaacaaggaggccatatgtcaactgctagctcaaattttgtagtatagtagtaaattgcacgacttacacgcttcaatggactcagcaggagccgcatagtcattcaaccgagccatggcctaggctggaggggatagcgaccaccgcgtaatcagacggattgagagacaatcctggtgtgcagatggaatgaacttgaatttgatatcgagtccacagagtacacaccaggaaatgacgtgtgttggggcgagtcgtgagtacggggatacgaagagagacgagaaggtaaacagcgacgaatgccaagcccttgttgacgtttgtccgcatttggtttagcttgcccgttcagtgtttggatgactcagcgcccctcccagcctggagccggggtcatttaggcagcttactttgtagagttatccaacagccctagaggtacagactttgacagatcgcgttcttcacacctcgtactgttttgtcgttccgctcgctacacatctcccacaatggcatactcctcacggccaagctcaatgcttccaggcgctccaggtggctcatctatgcgccagcccggtggttcgcaatcgcagcaatcttcggcactgtcggcccgcattgcagccaaaaaagccgagctggagaacctgcgagagttacgcgatctgagtggaaccttggcgattcagatgcaagctttggataataagatctccacgttgaaagatggcaccgaaggttggcctatctgtttctattcgaagggctgatcgctaactacctgttttaagctgttgcgtacgtgctttccaactgggataatgttctcagggccatcactctggcttcgagtaagcgctattttcttacattggaattctacaactggtactgattttatcctgtaataggcaaagcaggcggactctacgaacccgagtcggatagtaagaatgtggaaaaacgaaacgatcctcgcctgccatccacgctggttcgcattccagccgagccacgtgataagactggcgagtgaatcagtcccttcgacttcagccacccggctgaagcaccctggatgatatcatcttttgcggcacacccggattatttgtggctgaaagtttgataggtaccccgtgggttcgcgatattctccggttatcttcgcgctcatgtgtatcaggctacgtaggacggcgtacagaatcggcgattgcctttgagaatgcactcggacctacttggctcctgtcacagccaatgagcggccttgccctcgaaaaaaaacactatcagaagaggcgagttcatggaggcccaatcatgggacttctcgtcatctgtcgcagaaagcgcgatttaactgagaatccacgagaatccgtttctcgcgtgaccagctatgcagagtttggcgcatgcaataaagattgttatctcgaaatggcagacaaatcagaagacagggattaaggagatcatttatttttccccctcagtttagttccttttgaaacttctgcactactgcaaagatcatcattggtaccggaatagatgcacagcagggaagatgaatggacgatgatgtgattggcgggtagagggtagctcaccatgtaccctgcgtactatccaaggggatagttacaagttaatagagtctaagtttttcttccggcatcatgagacgggacgcagagctaatggcgctatgatgccgatccgcagaaaagtcttattaccagttcgaggttcctgcagattttaggggcaaaaaaggcgaacagactctctagcgtgtgttttagtgtctctctagtggctagttaggggcctacacaggtacgtctccggagtggttatcacgtatttcaggccattggtacctgagggggtacttggggcagaagtacctacttatcggttgattgctggatagctgatagaactatataacgttataagaagtgcgatacctagatatcaagtacccccatccgtatcctgcgtatcatcttccaaggttcttttccttaagcgccccaagcacgactaaaatccaagccccctcttttccctgagcacaacgtgcccttcggattcgacatgcgcgattatctttccccgcaatagccgtgtggcttttgcactttggccgctgcatgtatttatatcgatttgtctttcctcattccattgcgtggtatggcatgatcgctgtgtgacacttcaacaatgtcaagtttgatgaggtgatctttaggcttctttacatcttacctttcttacttccggacttttgagctttgatctttccattctcttctatatacaatcctcattatcctcactatctctaaatctaaatctctcaatcttgcaaccttgcaaccttcaacgttacaacattaccatacaacattacatccaacttcaatttcttgctttacctacctcaacccgagaacatacatatacaaccatgtccactgaatggtctttggacttctgccttgtctgtgaccgtcagaccttgggcgctccttactgctctcaaacgtgccgcctagccgaactggatgagacatccgatggaatgtcacgaagatcgagcgcatcgtctacacattggtctgagatcaaccaggcccaagctcaagtcgaggccgtcaatgcccacccccttcgaaagctatctgcctcctcctctcaaacctcactctcttcgctcaagagcaacacccccaattctcccaattcccccaatgtggccgatcggctccaggatgaattgcgtgattatgcatcttgcttcgaccaagtccgcgacctgaaacggcgcatgaccaccacataatttcaatttcaattcgaacccaaactcaaactcgaaaactgggcttctcgagcccatcctcccacatctggtggtgccgagggtacccaaatgcatgcagccctcatgctgcttttctgctttctgctttctgctttctgctttctgctttctgctttctgctttctgcttttgatcatttgcatacacggaaaagaggcgttgtttgaaaatatacattattgcgtctatgtttacggttgttctttctgtttttgtggatcagccttcccacttggtctttctcacgaacctatacccccccaattgttatatatatcatgatcatcggaaggagttgaatccaggctcaggtgcctcacctaattagttatctaccagactgcctataatcaaattggaattatggttgatatttttaagaaaaaacatcttgatgtctttagtaggtctctaccaaagcccaattcgtatcccccattgggtaggttaagtgcgtcatgtcaatttcccacgtcagtcaatgtggggaccctgaggaatgtacccgatgttaaccgtccaaccggggaatgctagatatatcaattagaaccactcctcgacccatcgacaacacaccaaatctgtatggagccagcaattcgagatgcaagcgcaagcacaagctctagcccaggaccgccatataccctttgaacatcccacggccggattcggctctgtgcagaagcaaatgccttcccgcccaacttgctagatacattcactgcgcaagagccttcaacagcgccttttcattcttcggcacaaatcgaaccttgtacttttgaggaatagccaccaaactagtcggatccgagttaccccgaagaggatgacagtctgttttatcatgagattccagacggaagctgttcaaggtccggatgaagacgaggtagagctcgcgattggctagcagcgaaccggcgcacattcgatagcccataccgtacgtaaaaagaggtgcgtcgggctgctcgagccagcgctcgggacggaactcatccgggtcagtccacacgtcggggtctatgaaggattagatgtgttggatctattgccagatggatatcaagttcgactcacccatgttgcatgcccaggcattcaagaagaagaccgtgcccttgggaatggtgattcccttgtaggtgatatccttgatggaggtgcgaggaagtgctaatcgcagcacagtgaagtatctcaggtatatggttagttcaaggactattcatagctcatggcagcgatacaaccggggacataccgaaggcattccttgaccagagctgcaatatacatacacttctgatcatcgtcagaagaacacatgggatcatcctcgccatacatctcctggattgccctggccgcccgatcctggatatcaggacgctgagccagcaagcccagactccacgcaaccaaagtggtgacagtatcaagaccacccgaaagcatggtcaagctaatcgacgtcaactcctcactgttcagcttcgcctctttatccagaataacattagcctggatacaaggcttatgtgtcccctttgccatgcgctcatccaaatcactattcagcgcaccgaggtacttatcacgacggattctcatctcggcggctttcttcgaattggaactaaaggggttcaaccgcagaagcgggacataatcctgcaggtttccggtggtgcttcggaaccgactgatctcttcttccacctcggtgatctcatcgaacaggtcctcttcctgcgaggcgatgcgcacgccccagttcagagtcaacgccaaactcaagctcagacgctggatcatgggcatcgggtcgacgggtgtcttcccgtggtttccgtatcggtacagctcttccacgaaggactttgactcgacatccaagtgtgtcacgtacatgtcgacagaggggcggttgagggcagatgcagcgccctttctacgtcttttcagggactcactatagggcgaggtaccgatagtcgttccggcagtattggaaacaatctagtcaagtatggtaagtttcagttacaaaaggcacaactcctataatcaccttatggaaagtataagtctcaggcctagagctcaaagcctgtgcattctgaccgaaaagcacctttgccgatgcagcagagttgaccacgacgacggggatgttccccagctggatctgataaacggcaccgtgcgttttcgaccagaggcgatactgctccgcggcattggtgcggatctgcgccaagtttccaatcaatggcaatccgcgaggacctttcatacccttaacgcgggcggaatcacgaatgaactcattgagaatgacatagaggacggggacgaggaggacagcggcggctagcgagtggtacggatactcaatcacgctgccttgtagcgatgccaggacagcggcgatagccatggtgctggtgctggtgctagatgggatagaatctgtcttggaggtctgtagaaatcatgaacatattgtgaaacgtaaccctaggctacgggatatataagtagggtgtcataggcctaagcgtcgaggcttccattgaatggaacatttccgtgttgtcagggtcgttcaagccgtgatcgtaacctagtgctttcttaccccacattaccccaggtcttccaagtcgtgtcccgccagtctatgcactgcggcgatgtgctcaaccgagggcattccgcactccggaattcttccgcttgacggggttgaaggtataatttgtactgcgttgatctaagtggaccaaatgtgcggagtatgttaactagttatagttacatcttctactttatttggttgtttgagtcggtgatttcatgtgtttttagggttcgcgtcgctcttctatggtattttgcttcttttatatatttctcaatttgatggtctttcaagccttggcatttgtgttgaatatgacatataacataaactgggtttaggtagatcgtggtataatgcccctatttgagatatccaccagcaacagaaggatctctttgccaaattaggttttaaggggtgctttttcctaagaattagggaatccttctgtcagattttgaataactacacagcacttatgattttttatagtacgggtatgatatcatgggataccattgtcgcataagggactagtgaagatcatatccactcgcgcaaggactcccttctctttttttaaacaccttctagaaagaagagcctcaattggtaagaatgatttcacaaccgaagattccatggtggggctactgcatatcttggaagaaagatgacatttttgaccaaaaccggaatccaacctgcagggattggcagtggggccaaggataagaacaaggataaagatatgtatgcacagggggaattgagcaatcccagcaagtggagtagatccaaacaaggtgttcataacggggggcccctgggctccgtgggccggatggggcaaggcaagatggctgtctgtgactgggtggatgtccatggagctctcagtcaggtggccacgaagagattgatcaaggtccagacccattgagacagatctgcagtcccgggcatcaacaatgaaatgtagaatcggcttcccgacgcggttggtatcatattgattgtcgtccttggggttaggattgagcgcaagttggaagctgtccaggtggaattcgggaaatttcttcgcgtcatgtgtcgtcgaaaaccggacggagttcccgagccaattggtgtggaaatgaggaaagaagaggtaggtatagcccaatccccactgtcgcgctgctccaatggtgagctgtcctgctgccatgacgcagagctttgttgtactcgtgacacccctgtattcatagtggaaggtgtagcgatcaagtattcgatactctgtaccttggagattgtcgcaaatcttgcctttcatagaggtgctgttgttgacaggtttattatatcaagttcgtccaaaaaaaaaaaaagagggaattctcatagctgtggtcttttctcccgcccttcgcctctccccttcagttcttcctctcccacttctcttcctctcctcccccccccaatcttctcctctattcctccgatctccctcttccggcgcttattcttgtaaagcaagtatcccggatatttgaacatttgaccacattacatcaccgtacatcggaataatcgcagataatggccgctcggcactcgcgcaagtttttgcgacctctcctctacacatcggcggcccccgccgccggaggagggggtnnnnnnnnnnnnnnnnnnnnnnnnnnnnnnnnnnnnnnnnnnnnnnnnnnnnnnnnnnnnnnnnnnnnnnnnnnnnnnnnnnnnnnnnnnnnnnnnnnnnnnnnnnnnnnnnnnnnnnnnnnnnnnnnnnnnnnnnnnnnnnnnnnnnnnnnnnnnnnnnnnnnnnnnnnnnnnnnnnnnnnnnnnnnnnncgggcgccgccgcaggagcaggtgttatctacatttcttaccgtccgcgaaatattccaggcctcgaagcccctgccgttcctccgccaggttactacaaaggcaagctggtcccgcccagtttcccttccatcaagtctcgcctcgaacagattgaggacctcaagcgcagtgaggaggaggaggaatatgatctgcttgtcattggtgccggagccactggagccggtatcgcattagatgccgccacacgaggcctgaaggtcgcggtggtggagagagatgatttcagttcgggtactagtagtaagagtaccaagctggtacacggtggtgtccgttaccttgaaaaggccgtgtgggagttggactacaaccagtgagattgtcctttcttcctcggaaagagatgaggtcggaatgaccgcatccccgcgcatcccttctaacaatcgcatcgcagatatgcgctagtcaaggaggctctcagagagcgcaagtacttcctaaacacagctccccatctgtcatcatggctgccaatcatggtgcctgttcagaaatggtggcaggctccgtatttctgggctggcactaaggcctatgacttcttggctggttccgagggcattgagacctcgtacttcctcaccaagagtaaggccattgatgcgttccccatgctgaagcgtgacaacatcattggagcaatggtgtactatggtgagtagccaacacggaccccgcaaatgatctaggctaattcccgatcagatggtgctcacaacgactcccgcatgaacgtctccctcgctatgaccgctgcgctctacggtaccactgtcgtgaaccacttggaggtcaccggactgaacaaggatgcatccggcaggctgtgcggtgcgcgcgccaaggacatcgtcgcagagaagaacggcgaggtcgccaaggagttcaacattcgcgccaagggtgtcatcaacgccactggtcccttctctgattccatccgcaagatggatgagcccaatgtcaaggagattgtggcccccagtgctggtgttcacatcatcctgcccggttacttcagcccctcaaacatgggtctcattgacccttccacctcggatggacgtgtgatcttcttcctgccgtggcagggtaacaccatcgccggtaccactgaccagccctgtgagattgaggctcagccccagcccactgagaaggatatcaactggattctttcggagattcgtggctacatcgcccccgatatcaccgtcgaccgaagcgacgtccttgctgcctggtctggcatccgtcccttggtgcgcgatcccaaggtgaagaactcggaggctctcgtccgcaaccacctggtgaccgtctctcagtctggactgttgacttgcgccggtggtaagtggactacttaccgccagatggccgaggaggccgtggacgaggcagtcaaatcgttcaagctcaagccccgccagctcaacagccttcccgacatcagtggtgtcggaggcagtggtctggttgctgacggtgccgttctcgacggtagctgccagacccaccaggtgcgcctcattggtgcccacggttactccaagaccctcttcatcaaccttatccagcacttcggtctcgagaccgatgtggccaagcacctcaccgagtcgtacggtgatcgctcatggcaggtcgctgccttgtcttcccctaccagcgaacgtttccccgtgcgcggctgccgtatctcccctatgtaccccttcgttgatggtgagattcgctacgccgttcgtcacgagtatgcccagactgccgtcgacgtgattgcccgtcgcactcgtctggctttcctgaacgccgaggccgcccttgaatccctccccactgtgattgacacaatggccgaggagttgaagtggaccaacgcccgtaaggatctcgagtggaaggattccttgactttcctttcatccatgggtctgcctaagagcttcatgggcctgtcgcgtcatgatgtccagaatggccgtgttacgcaggttgatgatgccgagcgtgcgactttctcccgtaaaggtatgtttgtaacaaacatttcgatgaaccacagtgctgaccattctagaaccccccgcggatatgattgagagtgacgttcgtgctactattgaaccccctgccgcaacacccgcgctcggttagacgtgtggcatatatagaccggcttgtataaatagaagcgttccttttttttgttccaatattgacactatttaaccagggactttggaaaaagaccctcaatccaagaccttaagatgacgctttccaaaaacacgcgcattcacattcggaaagtgccaccctgagcatgctcgtagtttcaatttcttcaatttcttcaattccctcatttctctccatttctctatatcttgtccacactcacacaccatgaataccagtcagtctgatattgacctccagtcgctgcgctctgtgaagcgcaagttggacccggagaacgattctgttgtaccaaagccagatctggaggagtccgatccctttggagacgaaagccaatctggcgtgaagtacaagaccatggcgtggtggtaagtgtttccttttccacaggcaggatgaagctcatcctttcaataggcaagccggcatgagtaagtcaatgtcttgcatattgcccagctttctctaacaaaccggtcagtcatgatcgcagaaaccatctcgcttggtattctcgcgctgcccaaagcgcttgctgttctaggtcttgttccgtacattctcctacccgctggctgcaaaggccgatgagctaacctgtttgttcagcggcatcctaaccatcctcggggttgggatcatctcgacgtataccgcatataccatcgggcgattcaaatgccgccatgtccaagtgcacagtatggctgatgctggtgatcttctgatgggaagggttggacggactacactggatgtggcccagctcgtcttttttgtgttggtcatgggaagccatatcctcactttttccatcatgatgaacgttctcaccgaacattcttcctgcaccatcgtattttcggttgtcggtctactcgcctcattcatgttgacccttccacggcgacttgagaggctttctcacatctcctccgtgagctttgtgagtatcgtcggagcggttcttactggtatgattggagtcacccttgtcaaacaaggcccagtggaggtcccagctttttcgcctccgcccaaagtgcatgatgcgtgccttgctattgcaaacataatatttgcgtacgcaggacatgttgcattctttacccttttctccgagctcaaagagctcaaggacttcccaaaggctctggcgcttttgcagatgagtgaaatggtcttgtacacagtggcttctattgtgatatatgcctatgttgggccaactgtcaactcacctgctctcaattcttcgggacaattgtttcgcaagatttcctatgcaatcgcactacctacggtacgtatctttttccgtgtacttcttttggatatgagcttaaccaatgcacagatcctgatcgggggtgtggtgaacgcccatgttgccgtcaagttcatttacgttcgtgtcttccgggggaccaactcgatgcatacccagtcatttagggcgcgggtagtttggactgttacatgtgcggggctttggatcttgtcgtggatcatcgccgaggcaataccggttttcaacgatgtactagggcttgcggtgtgtactacctgtccctgaccccacctgcagcgagtactaatcattccaaccagagttccttatttgctagctggttttcattcggtctacctgggctattctggctctatctgaaccgaacttgttggtacatgacctggcgacagagggcattgtttggcttcaatcttttctggtgtttcttggatttgtcattgtaagttgagctctactgtggtttgaagggtcgagttaacctacgccaccagtgcattgtcgggttgtactcgtctattcggtcgatctttaacaaccttcgcgagggtgtcggaggaggtagcttctcatgtgccgacaattccctctattgaggcagtcttacgacaaagaaaatgatttggatgggggtgggtaggttaggtttggaaatgggcaattacactcgggtcacagcattaacgaagcacgaagaacatacgacgcagagaactatccagctacatgtatagaataaattgagttctcttgcacagtttcacagatgtaggcgatatgcaaggagccgagattttgcggctgctacccttcaacggctaagtggcatgtgttagatctcacaggggatccttgtcctcccgatcggatcaaaggcagtttcaggatttcagggaagacaaatgacatcttttatgcaggagatagcataactatccatccagctgtccttttcggagaatcaggccatacctaaagttagagatagcacggtgtactccgtagttagctggttgctatatttcctcggccgggaggtgtacatcacgtgatcggtttcgaatcatttagggtttacgtcacgttgttatataactccaactaacattgtcgtgtttatctattccggccttgcagcccagatcatccgatgaaaagccgaggctgtccaggggcgtactccatccagcacacaaaacgagagttaaggatcaaaataggggggggggcaaatgggaaattgccagacatcttacggagtatgcggagtatgtatgtggataatgatacctaatagacattaacagtactgcgtacgtggcccataaaagctagttagttaatgaatgactcgcatatggtaaccccctgggagttagtgggctcggggaattggctgcagctactccgtccgtactccgttgttaggtcccgaggtcgcatacccgttggtatgtaacaccatctcggactagattgatatgttaattatgttagtgttagtatcgtgtttcgagaagaatagagagaattaaataatgccaacgcaaaataaaagcagaaccaagaatttaaatcaaaagtcaaagaagcggggatatatagcagaccccgtagccaaagtaacaatagctactccgtactccgtaagctacagctgaaataatatccacttcctgacgtctgataaatgattcttattaactaaattatatttttagcccaagtgctgctcccatatattgggttcccctcttttttttttgcgtagaagcccgacgtatgtattgtgtcccaatcaagacagggatcagggccccatacttattccctgtacagcaaaggccccgaagggtgcagaggaaaagtggaaacagaacaacggcaaggcatacatgcatgccatcatcacaccatttccccgaggattggggaaggaagggcgtgaccaggaaaaccggtccttcgatttgctggatttgctgtgtatcgaaatcacatggattcgatccaatgatctccccaaggcaaatcccaactccaccgcttcttgtcttgcacgcaatgtagatcaaccttgttgatctccgtgcagatgtcgcatgggaaggaaatgaagcggtatatcccggcgggatctgattctggttctggctgtaggctctggtcgactcgaagctggaacgtgccgtggggcaccagtactatgcgaggagaatgcgacggaggggagtaacgggtctcgtgatgtgggacattgggcaccttcgaacctacacccgcactcgtctcgctgtaccgcgcaagttctagagacatcatgcagaacctcggagaaggatatggaagaccctcttggctagtgctagcatcgcgtaccgatgaaccggcaattcaagcgtagctagttggcgacgccatcgtagttcgtatttccttggtagttgttccagaaacgagccacggcgctctgggcgacgggcgagccacggtagcgtgtggtaaggaagtaattgaagagggcgaactcgtctggcgtgagcacatagctatctggttgggcttggatgcgattccacagttcggtaatggcagcctccaggacggcggccgattgggcattcacggggccatcttcgcattcgcgagcgtgttctagagcctgtcgaatctccggccagtttcgtgatagaggaaggttggccatatcgttggtgagggggggtgttcagctggtggtgtgctgtgtttgagggtcgttggtgagggaggttttcacgattgatgtttttgttgggggggaaacttgggagaaaagggaagatgtgcgccgcgagggctcgtcacaagcgaaaagggtttcaggccaagtagaatgcggaagagatgagactgtgcataagaccaaacaagaaaatccgaatcttttttctcaataattaaatgggaacaggtgtggagcaacgggagagggaggggaggggggaaaaaccgggccagtagtcccgaaacctatattcatgagtgtgacatccgatagcgaggtaaatgcagatggaattagttgacctgtaggctgtgggacgaggttcaggaacagatcggactttaccccgaaattggagtccacagatgagaagataagtccaagggaagtccaacggttctcctttctcctagagagacgtgaatgggaccacacgccattggcgagacctggaaagacacataatccataaggccacaagggtgtagtttgcatgggctcgggattgcgccgcgctcccttggcgtaacggttttctcgggcaattttaatgacatgctccggctagcatcgaactaagccgtctaggacccagatgagacacggtggagacgggtggaaaccgtcacgaacgtgaaggtgattcgtcgaggagttatagggttcaagggtcagtgtcgcttcaagccgtcgactgtggttggaggaaaggggggggcgttaatggccccagagcaatgtccggtgcatcagttaagtggaaccggtgctccggtccttgtggtccttgaggctcgtgggacttggattctccgaagcattccaatcattgccgagttcgatataaacattgcgttagcgttgttccgtttcggactttccacttacatatgatttattcgttcacatttttatcctggcgattgatctcaccatgcgtgccatgacgatatgtactgacttccgagacctcacacagttcttgttttcggtcacgagcgcctttaactgtcgaatctcaggggttgttcgtccgaaacccaaacgctgtgtttctaggaatatcaaaattgccgggtatcctctccgttgcagtccgggcacgaaatcacattctgtatgagtcccgatgtcgcattcaggtgtcctttttttattctcattatttttattcccgcaaatgtctgtttacccctttcgacagaggcaacgcgtcgtagacatgaggcatttgatgcgttctagcgagtgcacacgccattgttttggtccaattctgtgaattagactcttcgatgtgatcttggccgttcgaatatgtcgagcttgaagaaaacatgcatatcgagggatgcgatatcccaagccctaagaagcgtaagtgggaagcgtaggaaggcgaggggtgaccaaaagacggcaaatgttcgaaagcaagcatttgccggtcaacgccagcagcctagaccggatagattcttttcagagaagtcagagagaaggacaacacagaacaaagtgaagaaaaagcgggaggtgcctggaacacggtccacataaaagcgcaactctaaatgtcccaaggccccggcttcccccttcgagcatcttcccttccttcaacctcacattcctgaagagctttgttccttgctttatctctgctctttaggttgaactcagtactgccaactcgcaacccactttagcaggcagctctggctctggaatagcggcaattcatggggtattgcggcctaacacgagaagaagcaagaatgatgtccgatagaaagcatctgccatggtacttcgagggaccagggcattttcccggtctcggccgcatgccagtatgatcaggtcatggaggtcttgaaccctgctacagtgagctgcgtcagactttgaagtttcaggagttaaattttgactctgctaataccaagctcaataggaccaccccagacaagacccacacggaccttcaagtgacaagaaacgaccttaccttagataacattccaaggaattctctacggaacgtaccaattgtgccacatattgcctcgaatgcagattggaagtctgcgaagttccaaacctgcatccgtgattgaagaatactctcaaatagtggcaacatacttgagctagaatagcccgcgcaatgcggtactcggtgaggatgtggcacaacttctgttagctgtcattttggaaatggtagggtcagagcaggatcctgatcacgaacccatccggtatggccaaggagatcttatgggctgtgcgaaccctaacgaaatctcgtctgatatttcagacagaactagcaatttaatattccgagacactgataccgttgccctaccggcctgattattcgttgatcatttgagtctcttcctgaactggtgtcttggcctggagtagccttcgttgaccgagagaaacttggtatgatacgggcatggcacataatgggattattgatcgattgtactaattgatgctcgagtgctgtcattgaccacaaaagctaatataccagtagtataatttgttttacgttcagatggtcaagtccatcgttgctttcgattgttgttacttgactctgctgatgaacaacccacggggctctttcttgcgtaccaagctcttcagggctagttatatgtcaattataaagtctcgcactttttgcttgttctaccccgtctgtctagctattctcttgcattctaaagctacacacgggtgcaggttctatacataaaaactaggcaaggattgcgaattcaaatattctagaccatgtcaaaggtgaggttttacgtagtctatagaattcggataaggttcatactctatcttaaaggagttataaactgtgctcagtctctttcccttgctttttatacaaacataagtaccctgtagttcccagacacaggtatttgcatattcacataaaagccaagcttagccaaattgaccggcaagcacggataagaattgcccagctttatttttatgacatctcgagggcgaataaggcttctagccctgctggaggcctggaggcctggagccctggagatctatactgctgactaagctatagataaagattcccccaccagcgcgccatttcaacttttgacctgcgccgatcacgaattgtgagaacccgatttgcccgaacaaggtcatttgaaagaaaagaaggattgaatatcgtcgccatggtgttctatttcacatcgaatgtcgttgagccctccgcctttatttatgtcggcaaggacaaattcgagagtatgtcaccgacttggtcaacctagggaataaacttctaacaatggtgtcagacgaggaactcataaaatatggattggacaatgatgtctggtatgtttcccggtatatatttgtagaacttcggggctgatattcttgcgcaacagggtcagtctttccctgtccgacttgcgacaacgccaatcgccctaaccctatacatttgcagttccacgtcgacaatttgtcaagtgcacacgtctacgtacgccttcgagaaggcgaaacatgggacaacatcgccgcgccgcttctagaggactgcgcccagctcacgaaagcgaactccattgaaggtcagtcctcgacatgaatccaagcattcgtaccgatggagactgacttctgggaaggaaacaagaaggacaacattaccattatctacacaccatggtcaaacctaaagaaagacgggtcaatggcggccggtcaagtcacattccacaatcacaaactggtccgcaaggtctatgtcaagcagcgggagaacccaattgtcaaccggttgaacaagacccgagttgagaagtaccccgatctccgagccgagaaggaagaggacacgaagaagaagcagcgcggtgatcgcaaggcccgagatgaacagcgtgcgaaggaaaagaagaagcagcaagagtatgaacagctcaagtggcagaaagatcatgcatatgatgatatgttcacggaagagaacctggaggctagcaacaaccaggaccgtgatgaggatttcctcgacgacttcatgtgatggacaccgaaggaagatgaccttttcctgtgtgtacttttcacagccagcgaactgaaaattataccctctgcattctataccacggaggatgattgatatgagtacaacaaagcagtcctcttatccctgttgcctctttttatctactacggtcatatacaatgatatagcgagatagataaatactcaaaacccgacgtcttactaatgtcgtaagcatgctaggattatttttcaatggacatacaccatgtgaattcccttggcatactatgggaactacgaggctcgcagtgtgccccatacgcacttcagtacagaaccataaaagatccaaacatgtcgaggtagatacaggccaaaaaaacacaccaaattaaaagtgaaaattaaattaaaaagacaaccctagagaagtagaatagccctagggaggttgatagattaatcatcgagccatagggcggaaagggcgctaagccgtgttgacagcttaccctgtaaccttaggaattcaccatcttcctctcccaaggcctttccaaacaccacacagcatgagcgagggaattccaccgtctgctacaccaagtaagggcattcattttgtgaattggaacccgctgaccccgcaaaaggcgcaaagtccaagaagaacaagaagaaggccgcgaaagccaaggccgactccaaggccgacgagccccaagaggatgcgccagctgatcataatgacactgatgtatgtggtaaacctcccccgattgtcattgtacctttgctgagaccctacaagaacgagcacaatgatgccaacgaggccgtacaagtgccagaatccaacggcgccaagcccgccacgatagacggcagcctgcctgatcggtctgtcaagaaccaggagtccgtggctactagcgatgcccccccacaaaccgataaccagtccgaccccgcttccgctggcaccgagccaaaagaccgattcgatgcacttgttcgagatcgcgactcgttacgcgcggaagtagccgatatgcgaaaatcattggaacagattcagtccaagcacaccgcagacatggaagccctgcagcagaaattggaggacgcggagagcaaaaaggagcaggcggaaacgcagttccagatgctcttggaacgagttaacaccataaaatcgcaattaggggagagactcaaggaggatgctgtgcgtggctcagaactcactactcgggctttttggctaatcctgccctataggaggaattatctctagcgcgatcacagatcgaagagctcgaagatgagaacgaccacttgaaggaagagctcgattcaaagtccaaccaactcttagaactatcgggcgactcagcagagagagagaaggagctgtctactcttcgggaccggacgaacttatcccagcagaattggttcaaggagaaggaagaattgctcgcgcaggagtcatacctccagtcggagtttgaacaggcgaaggaggctatgcataattgggaaatccttgccatggaggagcggtctatccgagagaacctcaacgagaaggtcggggatctggaggagcagctcagtagcctgagagatggttatgaacgcgccacccaggaacgcgacacccaacagtcaacagttgacggccttcagcgggctttgcaggaaattcaattggcgcgaaagcaagagctgcgggagcttgtcgagagctctgattctcaactcgaggagctcagacgctctctacgggaagcacagaagcaggccactgacgctgacaagggtctgcagaaggcccaagaagagattgagcgagtccgaccatttgagaaagaggtcaaggagaagaaccttctgattggcaagctacggcatgaggcagtcacgttgaatgatcatctgacgaaagctctacggttcctcaagaaaggaaagccggaagataatgttgacaggtatgtccttgttacctcgaactacctcggtttcacactgacttcatacagacatattgtcacgaaccatttcctgcacttccttgctttggaccgatctgacccgaagaaattccaaatattgcaactgatcgctgccctattaggttggaacgacggtgagtactgctaaatgcaaatgaaaatttttcgagccgatctaattatcaatagagcaacgtgaacaggcaggtcttgctcgcccagggacctcgagtatgcccgggaagctccgagtccctggcactcccctccgcacgccgagcacgccaaatctagcggagttcatggacaacggtgcctctagtaaggagacattggccgaactatggtctaatttcctggagcaagaagccgaggtgggtaatatgaatccatcgcgacgaggaagccaccaaaccctgcctcccaaatgatcgagtgcagaaatgtatgtataaagcagggaggccaagtacttggatattgatactttgatacattggtatttgtcctttccttttgtttgatacctcgcatgtatacaacctatataatagccagcgccaagaaatacaaaggcccagatgaatttgttccgccttcctattaaataaacaggctaagctgtattgggacggaacaaagccgtcttcagctaaataatcgctttgttcatttttatttcagtccttatatgcctctcttgtccttccgtgggttttcagcgtttttcaaaccattagtacgcgcgactcactctgcatctacaatggcctccgctggtaagtcgaaatgcaccatggcagaacataaccccatgcgacgcagacacaactgacaggaccacttctatactaaagcctaccgccctattgtgatttccggcccatcggggaccggaaagtcgactctgctcaagcgcttgttcgccgagtaccctgaaaagtttggattttctatctcgggtcggtgccaatacaaagggaggggttaaatgaattcgcaaacggctttgctcacgcgccccctgaatagaaaccacacgatccccgagacccggcgagcaacatggccgtgaatataacttcgtcacgaaagaggcattcctcgacctagtggccaacaacgggtttatcgaacatggttggtggacactgcgcacgctacaagaagagaagtcggacgttagttaacggatagcgcagctcaatttggcggaaactactatggaacatctgtccaggctgtcaagaatatcgccgagaagaagcgcatctgcatactcgacattgagatggaaggagtcaaacaggtgaagctgacggacctcaatgcggtaggtgtcctagacaatctgataatggtgcgctcctctgatgatctctagcgtttcttgttccttgccccaccttctctcgaggtgttggagcagcgtctccgtggccgtgggactgagaccgaggagtctctacagaagagactcacccaagcccagaacgagcttgagtatgcaaagctcccggaggctcacgataggatcgttgtgaatgacgatctggagaaagcatacgttgagctgcgggattgggttgttgacggtggtaagttcggtgttgcgcaatagtacactacattatgcataggaaatgtgatttaatcgacatagccaaaaaggcgacatccccgtttgatatctttcaatccaagaatagaagtctcgtcaagttaaaattaagaaaactaagtacatggaaagcaccagagatggcacgagcacgggagcgccaattctctttttccccggcaatacaagctcaatggttctcccaagaagacacaagatgggatgtaggatacgataaaaacaaaacgcaaaagaaaggaaaaatgggatatctgcaagggcctgctggcgtcaaaagaggacagtaagttttcgaagagcgccgtcgcgcaacggtcacagcgctcacatcagacatgaaagatcagagtttagtatccgttcatgcctgtgcgctgcgagttgcggctcagctctcggtcagcggaggggctgataggccggtttccaccggtgtggccaccaccggcagcgctgctttccttcagggcaagcagctgcttggcacggaaggtctcgtagtggatctggctggtagtctcgaccagatcctgaaggtgggtgcgggtcaggaagttgcgcaggtagacaaattcacagtggttctcgtcctcgacgttaatgacaccccagcggttctggcggccgcgaacctgcttgccgttgacaacaatggtcttctcactgccaacaaccgagaaaggaatgatgtcctgtaaccagaggtcaatatccaatcagaatagctctacctgggtcaagcataccttgatctgagcgttgatagcacgctcctcatcatcgagctcgtcattatcgtaagggtacatcttcaggttgtggaaggcgaactcctccttgatgcgctccttgaaggcctgacgctcttcgagggtgagggagtcggacttggcaataacgggaacaacgttgacgacatcggacagcttcttcagaacaacgatatcgatgggcttgaggctatgcggggtcaatgagttagtccagaggagctctcaggaagctaaggaatgcgcggggtaagctcacgcatggccggagggctggatgaagaacaagcagcagtgaacacgagtatcttggatgtaacgctcacgctgagcggtgagttccttgcgcaggtatgccgagtgttgatccttaatgtacttgacaatggggtcccagctgatcatgattagcttagacctagtggctccatcttgatggggcttgaattaccatcgatcgttgttgacctggtcaccgtaaccaggtgtgtcgacaatgttcaagcgaagacgcacgccgttctcctcaataactagtcacccgtcagctattccgcatcgagctcaactccctgatgacaaacgtactgtgcgactctgtcttgatctcggtggtggagcgaacgggttcattgggggtgagacggcccttggagtcaatcaggtgggatgcgaagatagtgttgatcagagtcgattttccgagaccagtttggcctacgcgtgaaagcattagcttgaggctttcatcggcgcgcaggtattgcccaacacataccgacacacatgacattgaactggaagccacgcttcaacagcttgcgctcgatttgcgaggtaatgctgtcaaaaccgacatggctatgggggaaaacagtgggctgttgagccgtagctgcggtggtagcggtggccattatggacggagagatgatattgaagctgaacgaaagacagaaatagaagccccaaaaagacccgaagagaagagaagtatgtagttgaagcaagagcaccccttattatcgtcctctttccgaactcaggggtgggctattcctaatcgggcctagcgtctctccacgagaaaactaccgtcttccccgattgcgcttttgcttcagaccttgtgatagctcgcaccaccagctgaggacgaacccccgttttttgttcttgaaaaataccctcaccatggcattgcgcctcctccctttcgctccggcaaacatgtcgcgctcacttctgtccgagtacctccaattcccccgactcgctcggttcctcccgatcacacccatcgcgaccagcggattcctacaaccggtttcgatctctctcaatatcccatccctcctctccgatctttgggattccgtcctgcgcgccgttcctaagaagaagacctcccacatgaagaagcgtcatcgacaaatggccggcaaggccctcaaagacgtgaagagccttaatagatgcccgggctgtggccagatcaagcgtgctcatcttctgtgcccaacttgtgttaaaggtaggaccgaagcccaagctggaggaacatatatgtgattattgcggagaagctgactagtcaacagacatcaaggaatcgtggaggactctggatatggcatgagagcactgtaagaaataagggcttgttcttggggaatcaggatcaacattccaaaatcccaggctcaagctcaacaaaagagattgtatttctagaattggatgtggatacatgctgcatggcaactggcgtcttggttttgcgggggaaatgtttcgatatgactttataacaatccgacctaggtcggatttgaacgctgtgatcttttcaatttacctctttccatgtaactccggagcaaaaggcactacggagtacaattgtagatgttatggtgacggcggctagtccgggtgggaataattagacatattcatgctattacgactttactgctctatatgtgagcgtatctgcctctacttggctcctacttggctcactactagctttatagccacgtagtcgagacaagaggtactagatagatacatgtagtcaataataccaagtacacagtaaacagtgactatttcaaccctgattagctccaagcttaattttattacctgctatccaataatatagagacacttagctcagtagagttgttatagcacggtatatatacctaatttgcatgtggtaactatcatcttcaacaagatgcctctatcagccgtaaagagaaaaaaaaaaggcgccgataaaggcggaacgcgccttcgggccccaacgtcattgctcctccgcaactaaagtctcgacacagtcgtgagtgagcacggcatcatcagaatggtaaggtcaaatcaaaaatcaatagattttatcgctaagggacattttagtcgaaacaatacctctcgaggggttctgcggacaatggtgggcttcccgatgcacatatatcctgggtgatttggctaatatctgttttatagcgcacattattgatatcttctcgctggctataaccgacaagcaaattctatcaacatcgggtgcctcgtccatcaaagtgcattccaccatcgacgctgacttcccgctggtgcagtccattgatggtgcccataccattggctgtcaccacatcgtgaccaatgggaatggctcccgtgcaatcaccgctgggtttgatggcgaaatcaaggtctggtcttgtcaggatgggcattgggctgcagacaccaagctgactggtaagaactgcccctctttgataggctacagggtgcaatactaatagcaccacagccgacctcacaaatgccgatgcctgggccatagctatttccgaagatggccaataccttgctggtgtcacgcaggaggggcgcattaatgtatgggatttggctgccgatggcactcggattcgagaccatgagaccaagggcagctttggtacttgcatcgacttggtgagatttcaaatgcagccagatactggcccctgttaaccttgacgtctagtcccccgatggtcggttgatcgcttcaggccacgaagacggcgcagtctatatcttcaccaccgaaacaggccgcatgccattctctctttcaggtaagcgaagttgtctgagccgagcagaaatacaagttctaactcggcctaggtttggtcaatcccgtacgagctgtggctttctcgcctaaaagcaagatcctagcagctgctggcgactccaaggtcattgtgctgtatgacacttcctctggtgaacaaatcgccaatctctcagggcactctgcctggatcttgtccctttcctggagtgatactggcgagtaccttttgagcaggtcagtcaatatcctatgcgtctatacgccggcaagctgacattttcaagttcatttgacggcaaggtcaaggtatggtctatggagaccaagacatgtgtcgctacacactcagaaacagataaagccgtttggaacgccaagtggcttcccaagatcggcaagacagaagggttcgccaccgctggcgcaaaccgcagcattgcattctaccgcgaggctactgggtaaaggagtggctgaacatggggcgttgcagaaatgtccttgcaactgcgttatgacgatttcaatggaacctagaaaaccttactgaactatgcataaaaatcatgaaattcgtattggaacaatgacagtgacccaaacgaccgtgtacttgtgcttatttcatcgcctccacaaacaacttgcgcatccgcttcaagaacgccccaaaatctcggtcatcgttcatgagatctacgacatgctccaaagcatcccggtcaaccttggggcgcgtatggaaaacctcatagtcgcgactggcagtgcccaattcaaaccaagcctccgcctcccaatccttctccaatagatggctatagacaaactttaaccggtcctcacgaccggcgccttcaattctaatacaaaggtaatcctgccagaactccaactccgggaaattgagacgcgattgcgcatctaaatactgtgcgtgagacttctgtgcctcgatcttttgacttatcgccttctgcgtctcggcaatctgctgcttcagacggtcgcgtttggtaaggcgggcatcgcgttccaaggtgatagatgagatagccgcgtgcatttcagccgcttcggctgcttccttttgaagggtttgttcatgggtttgtgatttgaggttgagaatttcgatatcgcgctgtcgcatgcgctcgtcctctggcaggttttgttaggcacagtcgtgggatatggtgggaacgggggtgttcaagtatcaactcataccttcatattcagccatattaatgtgaaactggtttcgttcctctaagactcgtttgcgaccgcgctcaataaatgcgtcgaacttcactgtgaattgtgccatggtattgcggaggtcctcgaacccaaagttgatgctgggcaatgagtctgccattgacggcgcatccgccgaggcgagtggtgggcgcatgccactcgtggagagcgacggttcgaatgaagaagccatagtattgagaattagattgtgagtagtgtatggtgaagtttgaggttgacgcggggacaatgcgagagttgttttgggttgcggcgcaacaactccgattcttatcgataaggatcaaaaaacttcccggtaccgtctccgcagctctgcatcctgacattatgcgcatatgtatatgaccgggtgaattctgactgctgaaccagtttcgacatggtttcgccaagtcctgaacctgatggatgaacatacaagcagtgctctccactatgggcacgtcggacgagctgtctatcttcctgaggagcaggaatggacgttcactcgttcttttgctaggcgtaggtacttgagcctccttttcttcaaaccagctaacatgttcccaagccccgttgatcaaatataccggtgtgaccaagacaaaaatcccatcgcctttccgctcagccaaagctcgaccaatacccagagtacccgagaaagaccctaggaggttaatcacaagcgcgcatcctgatttggcggcatcgtggtcctccattcgcgctgaacctttgtcgaaagctatcacgactgtagccgaaaaatatgacccggaggtctctgagctttttgatctcggttatgcggtggatcaaaggcgtcatgacaagaggctgcgctcagttgcaattgcggtggctgttaccggagaatgtcgtaatataatctcatttcgaacactggaagaggagattttggagttgacttctccacagaagttagcattccgtgctccatctatcagtgaccaggaaatgtctgaatggtccaagtgtggtgcgccggtacgtcaagtacactttgcacgtcccttggaggagaagcccatgttcctggctgcccgtctccctgcaacgactacaatattccgacctctttaccatttcgaccctgtgcctatgtgcccttcgggggatagtatactgggatcatccacccctttgaaaaactctcggctggatgcgaatccaatcgcggagctatgtgtgtcgcaaacaggtggcttctcacatgcagatgtgacctttaacccctggtatcagagacaattcgccattgtagacaccagaggtaagtggagtgtctgggagatcaccggcagacagcgactccagcaggccacttgggctgccgagcttgtcaaatcaggctcgttgcccatgcaggattataaacgcaaacatggttgccctcgccttgatggctgggcatcaatcgagtgggtccatgatgttggatcgctacttgtctccaatcgtcacaacgtcataatctatgccttcacggatgaccagattccaacacgcacggttgagttgggaatgacaaagccatctgagtgggttctagatgttcaaacaaactcgcgcaagccatcacagtttttcgtcctgacgacaacgagaataatgtggtttgatgtcggagccctaccaggcgagcatgacacaagtctttcactataccctcgagtgtcctggaggcactttcgagaccccgaagacacgaccttgcgacttagcgacatagtcgtataccaaggtatgtgcttgcgcgattgaacacggacttctaatactaagttattatctagatctgtatctcgttctgtattcacagctcacccggctagtacaagtattcccttgtcccttcatatccgatgaagagactgagtccatatctgtacccgatcccctggtgctagatgcgcccctgttggcggatataccgtcaactcaacacgactctgtcgtgcgattctcgagactcgtatttagagaaattgcccactctattgcaccagtgggtaggaatttctacaacgccgacttgccattcatcaagcttttctggatggattccaatcttgccgtccacgaatctactttcgaggccccgcgcggaaacccagacgagccggactcgtttcgcgaaagcagtatcttgcggttaagaaagcgttatgctccgacaatatgcgctggacccaccgatgactttgttgtggatgattgggatgaatcagcgacaaagcaaacgattgttcgtcgttgcaaaccccaaatgggccgcgttgatacaaggtcggacttgcagtggaccctggacttttctggcgtctaccaaatagcgacagggaaaatgaaaatggaaatccatccacaaaagcagacgaagagattaatgcccaaaccgaggacacttgatgcgttaataggggacctccaaatcgaaatggagaatggatcggaccaacctccaggcaaaaccatggttgaattgaccgacaagaaacttctggccgagggtcttgatgaaagagcagatgatctgcaacgactcatttcagcactcgtctctaaacagccgaaccccaacgcgcaatgtcgatatatgtttctaccactcccatcaccgaacggcagttatggcatcccggccaaactctcaggcgaagcagataacgatcttttaaatacatatgatcgaatcgtcgatgattggatgtctaccctgcctcgcgccatccccgtgcagacccgactcatgaaagaacaagtcattcggggggttgctgtcgatctcatcctttcgcgcctagtaaaaatctctacctcattagatagcatcatactggccaagcccacagatcctgtcgaggaccaagcaattgagaaggcaaatgaaaaggccgcgacacagaacaattatctgcaatcgagctacttctcattatcatcatcgcagatccctgcaagccaatcatcaatggccaaaagccaagtctttggatctgaaccagacgcaatgccaatccagcagtccaagtacaccgcagtcccggtcttgagtggtctctcagcattcaccacattcaagaccccacgtccagcaccacgaaacgtgacaaacctcttagcgcactggtcggtaggaaccaacccggaagactattcatgggagaggatggaagacgaggaaatgcgggagacgagggcacgcacacccaggagcagacggaagaaacgcccacagcctcgtgaccaatccctccctgcgactccggtaattcctatgatccggacatgggacagtcagccactcgcacctccccgactcaacgtcgccagtagtcagcccgcgatggatgatgtgtcgatgacccagatggagcggggagcttttggagcccgaccactcaagaagccgaaacagaagaagaaaagagcagctggattttagaaatggcttatagatcaaataattcaataatacatactctatacttccgcactatatggcctactacaggagacattggctaaccaatcgcgaatatggctcattctcaaagggatgaattatgacaaatgcagatcaccaaggaggacgccgaggtagaataagaagtatataatctccttttctctctttctatttctctctctttatctctctctcagccattcctccttttggtatattcacctgaaaccggaagtccgctgttatccgccaagcatcatcttcccctccttcaacaacaccccgcaccaacacaaatcaaattcccaccatgtctgatcaccagtacaagttcaatgtgaccatgacctgcggcggatgctccggcgccgttgaacgtgtcctcaagaagctggaaggtaagcgacgcgcggcctgtttcatcgttttttgatcctaacacgttggtctttaggcgtcaagaccttcgatgttagcctcgagactcagacggtcaatgtcaccaccgagcctactcttgcctacgacgatgtgctggaaaagattaagaagactggaaagactgtgaacagtggagaggcggatggggagagcaagcaggtttagattctctcaatgctcacggtgtttccggtcttatatataccccttttcgcatgaggcctggaagtcaaactcgcgagcttgcctaagctcgtggtactcaggcccaagactagactcggttgctaggcagtgctaggtcgaacataccaatagcatgcattccaacttcggaaggttttaaggttgctctggaattcctatgactaaatgacccatgacgagaaatgaaatagatagaaaacgaggggaccgcagttcccgattcaaattggtattgagacccatgaggagagaaattctaagaatatgcgcaagggtatcatgaacaacaatgcaatcaatgcaataaatgcaacgaatgcaatacaaagcatctcaaaacaaaggggggatgtggtggtagataggattaataatccacaatcacgaaatgtcttccatcagggaggggatagggtggacgtggttcaactctttgaacatagactgggcgatcctgctccgtagtttgggatgaggaagggtaattggaggatggtctgtatctgggttagtgcggaacttctcggggcataggggaaagttgtgttgttgaagtggttagtttcccaatgaaggcttaccgcaaggagttgaacccgccgctggctggtctttcatggggggacacgtgaggctggagctttcctatgatagagtctgaaaaggtgcgaaggtgatcatgggaaggagtcactcgcggtcctttgggcaatgagccacgttgatccgacgaaacttgagacaaattctttgtgccaaggtagtcaaagtctctaatccgggtggactgagacggttctccaatgggcgtggcctctggtccggcgcgcctggagacgtattcaagtggagggggctcacggtggtcaacatgccggacaaagtcctcggcataaaggttcctgtctgtgtggacgttctctgataaagggcggccactatcaatgcgggtgtgccgcatagcccgcggctctttcggagcacggtccgaacggaaactacgatcaccatggtaaggatgccacggtccggaattggatacggctggagccgctcggaaggtgcgatccccttccgagacaacgatactggtactggaaagcccagcctgagctttaggctcgtatggtccgctgatatgctgtcgacccaagactgaccttgtttctaggccatattgtgcgttggaataagaaagcgagttctggttcctttcccgctggtatcctacaacagggggttgttccactggcagatagtcccgacggaaatgaggtagctccttgggtcggtggtcttggacaagctcaaggcgacgataagggtgtggcgcgaatccttcggaaacgggaagtcccataggccttgcactccacgggtctgggcgggactcggttcgagaacgttcacgacatgtcagacgccttcttttgctcgcgtgttcgctgtcaccttccttttcgatggcatcgggatgatgccccatctctccttgagaataccctggcgtgaccgatcggagggacattttgttggtcatatgtaccaaaggatgcgaagcgtcagtccaccggctttctattggccgggggttttcgattgagggcaagatagagtcctgtgtgtttgaacctggtctgagaagaggggtattgacggagtcagggtaccgtcccactggggtcaatttctggcgattttcctttggtccgctcacaaacacaggtgcgttggtcctgtccgactgaggaggcagtctttcttgtcggaatatgggctccatcctagagggagggacatcctgcgagtggctcatgatcacattcctgggcccagagagttcttctaggatttgtaactcgggtgattccttattagttagtccagttggcctggcgttcatatcataggttgaataattctgttggacatccgagtgaagatagttctcctggatacctacatgtctctgtcggtccattagtggaatagcgagcactggatgtgcttggttatcattactggctgagcctggagcgactcgccgatgaacctcggcgtgttgaggaactatatcctggcgcctagcagcaggtacttccttagtaatgcgttgctcggcatatcgagggctttgcttttcagcgggggcaccggaaaacctcggttcttcggtgccctgtataccctctctatactccttgacagctcgggtccatgctttgtacctgttaaatcctcgacggttgatggtatccgtggctggggctcttgtgacaaatcggaacccaggtggtgcctcctcggatagttcccgtggaagatcctgaccaagagaattcgtattgtccataggctggcatcggatctcatgggcccgagtatcgcttgcaagtatttccacactggtgtcctggtgacctgctgaagcaaccgcatcttcttctgattcactgtcttcgtcgtccgagataacgatcacctcgcggaaaacatcttccagaactgtctggccgttctcatcgtctcctcgccactcaatgacttttgctagagttgtgtgttccacaacccctcttgcttcgtggaaggaagtggttttcaaaaggcgatcgtagtcagtgtagacatgccgaacgtgagcaaccacagcgagttgggctctgcgagccaaaggcaattcggtggcagtcccaacctttttctgacccttttttggatatcaggttttccaatttctcatttctcaaatcaagattgagtatatacgtaccttttgaaaagcagtcttgataatttgattcaaatccttctctggcatgtttggaaagagatccttcaaggcgtcccgtgcttctgtgttgagggtttgttgagaaatttcagattctccccgaatgttgttctctagtttctggatggggaaggtactaggcactgttttaccggtgcttgtgaggtagaaccccagttctgagcaaacagctgccaccacggtactagggaaatgataccctatccgatgaacatgctgggacaggttatgatggcgatggtggggcgtagtcttaaaaataagcagtgttgatgattagcaaccagatggggttctcaccgatactgcgtagatctggagaccctcgtctcgacatcgctccttgcacgttgtagtgagttgtggatttcccgcaggaatgaaggtgtagccgcttggtgcttgcgcttcaaaacagatctgttccatttttttgttaatcatttggtcatgccgaagcagggaatatacgtacaacactccgaagcttcttcttttcttgggtgaccgattccataataaccttgtgtcttctcgctcttctttgcgtagcccggtcggggccatgcctgaccgagccagctctccttatgacgcgggtcatacttgcggttcagcttatcgcagaaccttgcgaagatgaagatttcaacacatcattcacaatatgtattagacgtgtgatatgaacaggtagatggtatgtgcctcgttgcctggatcagggtgaatggcgcgtggtcaagtcaagacagtcgtgttatgcaccgcagtaacgaaaaaagtacgaagtaaagacaccccgcggtcaaccgaaacaggaacaaggcccttgatgcgagccttctgggtcaacttgagcaaaatcgtagggagcaaagagcaagaaataaaaaaaagagaaagaatgagaatatcaagaaggatggagggagagagagagggagagagcgcagataagatggctattgcggcccaagtcacctcctccccctctcccgatcaggctagtcctgcctgaggcttcagcctttccccaactttgaccgtcttttgttcatctcccctccaatgcgaatccaacatttgaactcaccacttcggatctccgttgattccgtctgattccgtctgattgcacatctgccgcatattccagattcgttggctcgtacatgtccaatagatcggccatgaacgcttcaatccaggccatgaaggtggatacacgagctatggtccacgcataccgtcatctctaccgacaggggttgaaagcgattcaatattcgacgcccggtcgccatatgcttctaaagtccctgcgaaaatcctaccgttcctccccttccgaagaatttgatcctgccaaaatcaccaacacactccgctttctcgaacgagctactgaggttgcgggcatggaacacaagattttgaagaaccttttgctagctagatattgggagcaagatcaccttgtgagggagtcccgcgtgtgagtgaccaccaacagaagtggagaagaaagccgctgacttgccctcagtccgcgatccctgggactcggccatgcagagaaccagctacggacaagtgtctttgaccattacaatttgacacttgaccgtttgaatgagagtctagggacatgtctcagatgattcgaaccccgcagttctcgacttctccctcagtgctgatccgacccgctatgccagatcgtgcgtccgttaggcctcagtgcttcccttgggcatgaatccgcaccggcgcgaggcagctcgcccaaaatgggattgcacataccgggtattgccgtgatcaggacaccggtacatatctcaatcgcatcaggattgcgtaggacacgatgacccgtcttgcctctaggtcagcctcgtgcgttgtattttacaatcttatggcatacagcacattatgtcgatggcaatctacacgccttggcattcaatgcaacgtcgtatagccaatcctcgtctccggacttgagactcattggtagatacatagtaggatctgcaggaagacagcattgatgatagtctactggtagaatactttgagcaaattccaacccaaatgatagtctctactccttcccaatattccctggttttcgagtccaaccgtccaactaaaaagtgtgccaatctcctgaggctccagttccagagcatgtgacgatgattcagcaccggaggcggtgcccgtggacgtcacatgtcacgatgtctgctgttccggctccaagtttgggtttgattctgcttgatttcaagcatccaaagcgatttagtgagatgctggtttagagcccttcatgagtggtttcatttcctcattgctgatccaagctggaatactatcccccttaccaccccaaccgaacagtcaaccaaatgacgacgaagctaaattccacctgaacaaaccgacatacccctcgtgtgatagtgaaggccataaattgagtcctctactggaccaagaccacggacagaactcgaattgcggagatgcgggtgcggggtccctgcatagccctcctttcttcacaaccctaccgaaagagatggatggccgaaactcgcaatcggagggcactcgatcagtgacccataacacacccggatccatccaaaacatagatgcgaccgcaggcgcctccattgatcacacacatgaaatcgacgtcaccgtgcagccggacagttcggggaattcactagtttcacatcccagcgaggcgctgagctcgtccaatgagccacaacatgcttcaacaatatccaccagcgagcctcggcaatctctcgacaatgcctttgatccggagggactggcacagtcttctcttccggcggatgatgggatgggagttctaagaagcaagatcattgcaatcagggagttggagctcaccaatgttgaaaaggcgcgcatggttcacggtttgatgacagaaggttaccactcatcccgtgagctccgaagcgcccctggtctaggggtattctcaactccatcaagtccggcgagcttggggctgccaacaagtccgaggactccgagggcctcggagatcaatacttctaggtcgggctcaccatactccgaatcagactctctttacgagacaaccttcaatctcacagctgaagatctgcagcccacctttgtacccaaggtagaaacagaatcaccagaactcgaaactggggacgaagagggtgacacagaagaacaagaagagactagtctggggtgtgtgcattatcaccgcaatgtgaaacttgagtgccacacttgcaaaaaatggtatacctgccgcttctgtcatgatgaagtcgaagatcactctctcgttcgtcgagataccgaaaacatgctttgtattctatgtgggtatgcacagcctgcagcgcagaactgcagacggtgtggcgagcaaactgcgcagtattattgcgaaatttgcaaactctgggataacgacagcaaaaagagcatctaccattgcagcgactgcggtatatgtcgaattggacagggactaggaaaagatttcttccattgccaggtaagggctccgacagaggttagacgatactggtactaacaacatatagacatgctctgtttgtcttcctatatgtattgagaacacccatcgctgcattgaacggtccacccagtgtgactgtcccatatgtggcgactacatgttcacttctccagaaaccgtcgtcgtcatgcgatgtggccacagtatacaccacaagtgtctctcagagtactccaaaagttccttccgttgtccgctttgtagcaaaactatcaccaacatggaatcgacattccgaaacctggatcgtaccatcgatagccagcctatgcctgacgagttcaaggataccaaaggccttatttactgcaacgattgcggttcgaagtcggttgtcaaataccattggctcggcttaagatgtgatttgtatgtactcttcgaaaaaaatggtcaacacctgctgatagcatctagatgtgagtcgtacaatacggcccaaattcgcattttgcacggagatatgtccactcaagccgaggaagacttcgggcaagacctgcttcctcggcctcgatcgtcttcatacactgaaaacgatgacccgatctcctcttccctggcagcactaaacgtcaataatacatcagttcctcgttcacggctcagtgcgcctatgtctactgaacccgttagacgattttcatcctacaacattacacgaggccgtgctgtctcgcccgtcgttagcaactactttggactgccgactgagcgtgaatcagagaaaccttcatctattcccttctttgggggaccatctcgtggcgagaatgaggattacggtgcattgaatttcttgagcaagaagcttacataccgatatggactgtttggaggtgagactaaatcaaccgaaagcgtattggaaactgagaatgaagaagacgacgctgagtcttctgactcggctgaatcagatggttctcctggtattggggatgacgacgaggaggaagaggaagatcaagatgaagatcacattcagattttcggtcatcagtgaggccgatccagatttttccaagtgaacccagatgctcgtcgtccaaggaagtgtgacccaacagctatccttgccctctttaattttcccccatcagcccctgcggcgagcaataaacatcgttcagcccttgcccacaatctacccggtccctgggttcgatttcagagacatctctgaaccggtgcccatccctgacaagaccgactcaatatttctgtcctggaatgatagcgccgtcattttctgtacctttacacatgtgatgactacaaatgtccacaactaagtaaagggcacacctcaacgcaactcggggattgttgcttttacacacatcaagcagccggcttcgctgcagcatagcgttcacttctttttccggtttaaagcacactggtatcatgacgcaacgatagcaattttattgaaactctccatcttacttggcctacactagattgctagaaatattatagtcttctactttcactgcgtacttgacgatataaagtatttaaatacctagtagaagtagctatagtaacctaaaaaccacgtagatagtcatttcccttcttacaataaaagccaatcggactaaagtgctataaaccgatagccacctaacataccaagcttccaagctataaataggattgaggaagccctgaagaggcgatggatggttatcgcgcttacctcagcttctggttgcagccacaagattccattgacgatccaggttgtatcagacatgatgttgcctggtttcatcctgtcttgcttattgaaacacctatttagccattgagccgactcatctgacttccttttcctaatttcccgtcctgaaacgaggcacggatccctccactcccccagccgagtgatgcgcatgtatttaactccttgatttcagcccgtctagattgctcctttcttttcttaaaagactggaaatcactcgacaaggatcctataacctagcttacaagtgaaattcttgtgaacaactccaacctcttccaatctcttatcagtactgccccgcggaatctccttcgtcactttatcagcgccgcgtcgcacccgcgtcagccgtactatgatccgtcgcaactccgacatcgagattcagctcccggacgctggtccaacacctctctcacccgattccgtgagcgatctcgatgtggaaatgttctctgaggagctgacacttcccttgagtctcccaccacacatcgcagcccggttcgcccgcaaaagcagcaaagcccgccgttcctccaccgcctcatctcgacgaagctcggtgtcatccttgcactcgcaccattccaacgcgtcctcaaatggctcgctaagtgcggaccatattgctcagcatctccgtcgcacgtccattttggagagccgaaaggcacgactcgctgatcgtgcattgcatgcggagaaagtaaggctgcgagccgctctggctaaagcagccacacgaaattttcagttcgaagagagggcgttagccgcccagcaggcccgcgagcgtctgctcgccgatatcaccgctaagtgcgaaggtcaggtcagacgggccaaaaagaaggccgaggaccagcgggagaagaaagctgccgaacaagctcgcatgcgtctggaaatggcggagaagcttgcggaggcagagaaacggcgcacattatatcagaaaacacaccgccgccagcgtactagcagcttgcccgtcaccgaggagaaaaagatgtcccgggaggtcacaaagtcggttcagcaggatgcggctgcgcggaagatacagcgcgtatggaaaacccacaacgcgaagatggttatgcagcagtttcagtcattgaacctgtctgtggaccgagttcgcgacatgacttttgaagaagttggcgctctcctttctgacagcaatttgctcgacactatgactaaagttctccgactctgcggtctacaggatatggaaggtggggccttgggtgagaggggtgccgtacgcacgttcctcagcagctatctcatcgtcactcacccgcaagaggttctgagcagcaatggagatcaggagcaggatctgattgctaaggcccgggagctgctaatagcctttcatcaggtcacggcgctgctatcgtctggctgttgctctccgtctgtgatcaccgcagatctccagaccttgtgtgaatctcacaacgtgtttttctctgctttccatgcttggaaatcccacgactctagcgtactgattgagatcatggtcgcacagttcgttgaattggaattgatttggcagacggtcaagaatgacaaagctggtggtgccgcagaagactacagactgggtatccgacagaaccaggtccttttgctagcccgcctgaagagacttgcagggcccgagcgacacatggagttgatcagaaattcattgaagaaggccaagcgggagaagaagaaggctgcctccaaacaagctatcccccgatctgctgagactgctcctcccaccacggttacgcagagtgtcacatcgcctcttagcgagtcattcaacaacatcgatgccgcagttttccaagagctggataagcagcggacatcaccccacgagagattcaccagaattctcactcctctccctgaaaatcgggagctggtgcatgaacttcttattaacaaagagttcaagatcgaggaagcaccatataccgaaccacgcagacagattatgaagcagatgtgcgatacaatgagacgaggggtggaagctggacacagtaccaactggactgtcgccatggccacagtgatccaagatcgcttgctacgctcactccaacagggaaattccctttatgtgataattagtgaagtcttagatccaaaactggtccagggacagtgcgaggctggcacattctcctatgataatttcttcggcttcatgaacaacatcttaccacgcctatgcgctccttaccgggaccctgtggtcaaggcatacattgaggatacttcaggcgatgctatcgatcggctgtctcggttgatgagcatcattgacctgctgtcactcgaccagacgaattttatgatccagcttgctgcaccccagctcatcgaagaagctccgggttatgagcggcgggcatttgaccgagacgtcacggacgggacagtcaatttggggaaggtccgacggttttggcgcattcatcgcaacataatcgttgatgagatgaagaagcgagacccggaaggcatccagggtgaaccacgcccatcaccaacacgagtctacgcccaaggtcttgccgacaccgttctaagcaatgcgcttgtatccgaagatataattccagagactctgagtctcgatcgccaacgactcgaacggctgcacgccagggcattccaaatcgtcgcaacagcttccatcctgttgacagcaaagaacctactcaagcgagacgcacggtctcaatggaaaccagaagcagaccggattctgtctctggacttcaatgagatcagcgcagagcgagtacagtctatcctcgagtcgacacatccgatgccacccgctgcgagtgcccagctcgcagctacgatcaaacgagtcctcggacccgtggccacagcatgtctcgcagccgcaccccagctcgcggtagtaacttcagagagctctgcctcagatgcatctgtctcctcagcagagtcgcacggagccacaacctccgcggctagcttctcggatccagtgacgaaactcattctctcccgccttcgcagccacgtcctctcgcgtctcagcgcatcgagtgcctccgagcggatacgggctaccaccacggccagtcagatgctcgctggtgcgggtatgccggagtttgttaatgaggttggcaagttggttgaagaattagagaaggtccgcgaggtggattggctttgccacgggtcggtatacgagggtttatacgaagaaggtgctccagcacaatgaaggcgttttagaggggcatgtataatgcagtctatgttttttgtttttgttcttttgttctttcattcttggattttggaggttgggactttggactttggactgggcagactggcagggtatacgactagttcctagagttttgtatggagtaatgagacctttgacttctatatatcctagattattgaaatgttaaacatgtgaaatgtcccatttgatctgaaatttatatacaaccctcctatctaatcagtaacccccacaccatcaaaaatccaacctcaacaccgtatccctccattccattcccctccaatccctccaataccttcaattcccaactaaaacgccaaccaacatgtctccaaatgtcactatcacacacctatccgacctcacacccccctcccaagaacgaacctggctcacagccccgcacccaaccctcccaatagtcgcaacctgcagttcagacaagaccatccgagtctactcccttacaaactttaccctcctctccacaatcaccggcggccacaagcgctccgtccgcacagcagcatggaagccacacatgtcgggggagtccgttctcgcaacgggcagtttcgacgcaacagtcggcatctggcggcggtgggataattacgggcgggaagacggcgccgggatgggaatgaccaatgacaataaccagaccccgacggatacctctgacgccgacagcgcagaccgcgaagaagacgaagaagaatggcgcttcgccgtcctgctcgacggccacgacagcgaagtcaagtccgtgtcatggtccgcgtcggggatgctgctggcgacgtgctcgcgcgacaagtcaatttggatctgggaggatctcgacgacggcgataacaacttcgagaccgttgctgtgatgcaggagcacagcggcgatgtgaagtgtgtttcgtggcatccttccgaggagtgtcttgctagcgggagctacgacgacactatccggctgtggcgggaggatctagatgattggggccaggtggcatgcatcaagggacatggggggacagtttggtttttggattgggagggggatgatgcagagaaatggaacgggccgatttccgattccaattctgagtccgagctgagcgctttacaagctcagtggcgttctcagagggcgctttccggcccgcgcctcatctcctgctcggacgaccgcaccgtgcgcgtgtggcggcggcagccgaaggaatcccagcagatgggcgcgttttcttctgccacgacgggcatcccgagtatcattcggcctacggggacagacgaggcttgggaggaggatgccgtgctcccgcatgcgcatgaactgcctgtatatgccgttgcgtggagtaagcggaccggacttgttgcttcgactggtgcggatgggcggattgcgatttatgaagagcgatttgttacaccggagaaggaggaaaagcaggatgatgcggatgctatggatactgcgtctagtgatgtgctacgaacggagtgggtgcttgttggtattcaggatggggcgcatgggatttacgagattaatcatgttgcttgggcgaagagagcagatcggggttctgggggtgaggaggaggtgcttgtctcgacggctgatgatgggagtgtcaaggtttggactgtgacgcggtaattgctttttggaattggcatgtgttgggtctaaatagcttataaacaaaaggcttgatgtatttagagtccagaaaaaggaagaatatataatcaatatgtcacttgagtagtatgatcgcagagatatcagaatgaaaatcatatttagaattaaaccgaagactccagaacaccgtgtgctttatacagatgccaaaaatcattccccttcctgaaaccccttcaaaaaatcacttgttatgaagactggcggttctcaccagtttctggatgcgagacatgaccttcgtcgtcactagcttcgccaacagcgtaatgctcccgctcagggctaggagaatgaagctggtcgagctcactctcatcgaaatcaccagcctcgacatcacgaccagaatgcttgttctggaatcggttgagaatggatgcattgtccgacatatcattatttgagacgcccttgtagccccggcgagtacggcgactgcgccagatgaaaaagccccaagcgatcacaccgataatcacaataacgaggacggcctcgccagacttagcataagcgtgcatctcagtctgtttcagcctctccttctcgttctcctcggcagcggtactgttggcctgtccgccgacagaagtctggggcagcttctcgccgtcgatacgcgaatcggaaggctggccgccaatgctggcgatatcgaccttcatgaagcgatcgagcatgtcgcggctctggcgggggttgtcgaatggaaccatatgactggagttgtagaagagcacgtaggtgaggttacgggcggattggtagatgccagcgggctcgccttcgaaggaccagtcgtggcgcggggcccagacgccaggggaggtttcgaagccgctgccacccatccaatccatgttgtggatcagagtctcggttccgatatggttgcagatgaggtccttgtcgccgctgaagagcaagacgttgatgcccgattcgatcaatcccggaagcaggtgaacagaggggatggagttcttcgcggtgaaggccatgtggaccataccagcgcattctgtccagccggatttctttgctgggttgatgttcagggccttgacgacatccggtcgctggagatacggctcaatgtttttcaggtcagggggccagttcatgccacaggatttggcttcatccttgagacggacatcgtacatgttgtaacattggtgattttcggtggttcgatcgaggaattgttgcaagactagctcgcatgcgccgacatccagtttgttcttcgcgccggcagtctccagcttcgagaggcagacttcgttgagtgcatttatgttgttgtgaaggactgtgcccggtgtgaggaggccttctctctcaacgaacttaaagtatgaagggtactggtctgcaggagagatccaaccattaccgatcagcaaacccttaatcggccactgtgtgcctccgttctctgcaacgcccttgttgcgatcttgaatggcctttgcaatatatggaatgtgctggccggcatacgattcacccgcaaaatatagctataacacagttagagctttaatcaatgtaggggacaaggcaaacgtacgtcatcgttcgcatactcggggaatagctcaaagaacttttccaagaagataatgaagtgagcggccatctcgtcaagctcatggagatagctattggtgttcgcatagctgaaaccggtaccgaccgggttatccacgaagagcaggttggcaaactcatcccacctgccctcgttatacttcaaggtatggtcgtcctgaagtcggtagggcccaacttccatcaatgcgccatccatagagctacatcctgggccaccattcagccaaatgacagtgcgctgtcggttcgcgatatgacgattctggaaatgccaaaagaacaggttgccgttgatggccggatcgacctcgatatgtctaaagtcgtcgtattagaaaagatatacgtccgaagaaatccaacttccaggagactcacccagcatgcatcttcaagaaagggccctccggcgccccgggtaacgagtgcacataataatccgcagccgaactggccgacaccaacgggctcaagagcagcgataatgcggataataacatcgcgacagtaccacccttcacagaagaagggaggaagggtattgagagcatttagcagtccggtgtgggtatcatcagactagaggtttaggtaactagatagtcaagtagagatgtcccgggagggactcgtaggcgcaaatcaacagatcatcgaatccagacgggtcggacggcacaaggggataggagaggagagggtgcacaaagaagtagcaaaacccaaagaaaggagatgttaaggtgttaaggtgttcagagtgtagaatgacggagttcaaaggaagtccacggctggcgtggcctgtggagtattgagtgtaattaccggtcattaccggtggattggacaaagtgcaccgccacttgctgcttgaatcacggtatttattgtattattcgtacgctgcatatttatttgtcaattgggattattaactgcaaatacgtctccttaagatctatatattttgttatgttcacctctaaatcaaaaagtgcacctcatcgccactggttgaccttattatagtttaattttggggatcttcaactagtaaatcagtgtatcacttagaagaaatcaatagacttgtcggcgtccttcttaataagatccaccatcccctgaatagttagcttcttgtttctctcagcaattcaatagtcttacatcaggcatgataggctgctcattggcgtccttgacatagcggaaaggcatttcggtgcgctcatgctcattgatgagcaattccgggtagtcgacatattgaatgtcctcgagtggtactgggcagaatcagcatccagcacatatattgtccagactgtttactttccacactcacccttctcgtgaacaaccaaacgagtaactcgcacggcagtatcggtggtcatctgcttaggccccaatcggcggccgacatatcccttctttctcaactccgaggtgcgatctaccaagtcgtcagtctctcgccgaagtgcatggagaaaaaagtacatacctctaggcgggtcatcacctgcagatgcagttaacagtcaaagggtcagtctgaactcaatctgtacatatcgcggggtaagagaaaaattccataccgaggataccaccgaacaagaagacctcaaaggtatcaccatcctcaggactcaactcggcctcagcggaggggtctagcaagcagaccttttccttgcggtcggcaaagatctcctcgacactgcgctgctcgacctcgagacccttggtggcggctagatctgcgggcatctgcagctcggcgggcacagagctgaggaggaatcgtgccccgcggtcgtgagattcacgcgcaatgcaggcatattcgagcgtggaccatgggcccagctcgggatccagatgctcgactacgaaggttgggcgagtcatggtgggtgtgggagagagacgtcacagaagcggaaaaaatgaagaaatgaagaagttctcaaggttcggttccactgtgggcaggtgacgaggttataattgatttaaccaatgatactattgtatcaagatgagcctggggagggtcatgggaagatttaggatgtagaaggttgttaaatacaatattaatgagtttagtatatgtgcgagcccaccacgaagtgtagtacatgtgcagtaatttatatagcatccaatagtacccagagtaaactagaggtatattctcactataacatatgatttaattgcttcgcgtcgctgcgcaatcataatacacattatacattctattaaaacaaaataatgcgcagttatccagggaggtaaagtcccagaacgtcatctacctacatagccaatagtggccaatggccatctccgatccgtcacctctctgggatttatttaaaaaactatcctattactgctagtctcttctctattatttgttattctttaacctattatttctctataagtcccgtctcaccctctttgccggtcacacatcaacttctccccgccttatctttcccgcttcaatttcccctccacttcaacttctacttcaactttcttcaaccatccatcatgaatccccaccagcagaacaaagtggacatcaacgtaagtacttctattgttattatcatatctttactcacaattccctagtcgttgagcccagaggagcagcgtctgctgcgcctctacggcaagatgcccaccaagaaagacgtcctccagaacaagctcaaggcaagcccaacacagcctaaccccaccaaacaacaccttcctgacatttaattttctatacaggaacgcaaatacttcgattcgggtgactacgctctcagcaaagccggcaaagcctccgacctaggcgtcaccaacatcgggtcacgccacccagtgccggagaacatcccgcacctaatctcaacctcaccaggccacaacaactctgtcagcaatggaagtgtgagctcccagggcgggcagattcccggcagcatcagcggacaccctggctcggtcgggttccaaagccgcagcccgatcaaggaggggggtagctacctacaccgtggtactagtatcagtgagggtgaggcaggctctggtctggcctctgaaccagtgcagagtgagcaggagcttagtgttagcccccctcccgcgagagagggtgttcctatccgtcgataggcgatgacatagtatcttactccactatgggtggctgtggctattctgagaagggcaattgttgcatgcatatcttttgaagggggtctgtgatttcacgttcaaaagcctggcgctatgggaatttctttgtctttttgttgtctttttttcttcttttttttccctttccaaatgtcttttgtgaatgaggggacaggataggggtgcactgcgggacagagcaagagtgagaacagaggcagtgcgtggacttgtgatggtttcaatgatatgactgatgggagtgggaattcactgcccagtcaatcgagcattgcttcgcttttcggtgtcttggctttttatttttctccaattaccatcatttatcaacttatcaccaatctgtggcattcggggtttttcctcttttccttgatctttgctctcctttttcatatctagttcatacgacatgacccttgtttgtgataatttccttgcaccacttcttgatttcattcttgcgagtgataatttgtgtacattgtattcctaatggactatcgtgttatgtgcataacgatacttccattgttttggcttgttatactatccaatttgttcaaaggttataggttatatacatgaaagtcgtttacacattctacggattgtcttactggcgaatctcccattttctcatctacggtagtgtattatatattgtccaacttggatgctctatgtcgtattaggaactcgtctcttgaactagatcatatcaaggatagaggctatataagcaggctgttctcgtacactacatagaaaatatcgctatatcgctatatagctctattgctgtattcctctatggacagtcaagtatgtcaacatagtggatatttgattcggcataatatactccatatggcacaagtaattaaaaaaagtctaataactggctagatattagcctgtaacattctcatgttctagcgtttctaggccctaaatcagtttagtatagcctaggtagaaagtggtcctccgaccgctagtctagctgtaacacttattaaaaagagatttcctcttttctcatttgaacttctctttcttgtttatttggtttatttgatttagtctattcaattcgattttgtttttttcaggagtttctactttcacttctctccagggctgtcttgcttgacccacgtgaagtgttgtgttgaaagcgataagcttagaggaaaaaaaaaagcaaacagtgtctccccctcaacttctctctcccacatccagctctgaacacgacggttgcttcagatccccccattccttcgatttccttaccgcgtacccaaccctctcggcggtccgatgtggctccttcgagtcttttcgtcggccttgttcctcgccatcaccgtctcctccatcccactagccttcgatgtgggcggcaagacatgtggcctagccttctcactgtccttagcagcattttacttcctggtctcgttgttgaaggtcaccacccctgaccgatcgtggttccgttcctccatcattgccgttctccgctttatacaatgggccgtcatcctggtccttctgatttggtcgctgaatcgattctcggttgatgccgacagtacaggcacaggatgggcggagcgcactttcagcagcaaaagggcgcaggattcttctcttcaggaatggctctttggtcgcgacggcctggtggaaacggtgaccctcggcaactgggatcgacttctgagatggtccaccccggttttccaactggcagagggattctgcagtttgttagtgattcaggccgctggacaaatcacccgctggctcgtcaaccgaggtggacgcagcgatagctggatggtatgttttgatctccccgtgggtgtctcgattaaaaaccaactcttatcctagatcggcctcttggtcttgtccgctacgattatctccagctcagtttacttcctttggcgtgttctgcaattccccgaaatctccaacgtcgatgcggccttgattggagtttccgtcacatgcgccgtcattctgtgtgcctggggtattggaagtggtcgcggtaacccagtcgaaagctccctcctcttcgcctatatcgtgctctgcatctaccagatcttcaccgactaccagccatcgcaccccgtggaacaaatatcctccccttcgcaggtcggagacttccctccactgcctcccatcatcatggcgtcgtacacaaccctgatgcacgcgctgtctcttctgccgtcgattattcacgcaggcttcaacgtcattaccaccgtcttcagtgctgtcacgccctccgtcctcatctcactcgcctaccgcctgctcgtactgtatgcatcgacgcgcatcatcccagctgtccgcgagtcgggggcccgtgccctttcccaggaggcttccattgacgataccgacgcagcaggccaagtgctgggtttcctgagctacttcgcgccgacaattctcatcgctgtctacaccagtctcctcatgcagcactttgcagcaacctcacaagcaatgggtggcagcggtgaatggtggagcacccaaggcaacggcggtggtaacccatggcggtggattaatcttgcttgcacaatatccctatacgcggtcgagctgtggctgggggaaaccaacgatctcgacaacggagtggcaggccactggaaaaccgactgaatgactacttgccagagtcaacgactgctaagtcaacctgcctacgctttccttcttatcattgccccagcaaaagcgcggcaggaaatccaaaggccaatcgaatcggccttcttgcttccttggctgtggtatattactgcacgagcctggtcggccacaagcctaccaagctgacctctcccgcagcaaccttgacaacgaaaacgccactcagcagcgattcaactggaaactcgccatcatcttagctacagctaccgtagaacgagttcttcggaatggtttcgatcgcctgacgccaatcaccggtctcggttcttcgtttcacgtcactccgcccgctcttccttgcttcctcgctaagcattctcaactgccaaacgagtgtatttggttgtctctgtctcgaggcaaacatcactctgttcaacatgccacaacacttttcacgactcgacgataccagataaacctattgctttttcttctttcttctgtgtcttccacacccactttgaattcccactgtttatccgttcggcacttataccctctgctgcctacgctcaactatcccattcacagcttcccggtttctctttcgctcccctcggccgaatcttgctccatctacacgcacgcgcacccactttgactcgaggccattacttgtacataggatacctggttctttcttctattgtatttcttgccaggcgcttggtggggttaatagatattcggttctctttctagatcgaatttgagtgttatagagcggacagttgtagtcttggctgccaccttgggagctgatagtcacatgctagctttcaaccctattaccaagccctacaacccgatatggaatggcagataagaaacctagccagctagagcgcagcaattaatacggaaagcacgtgaatccccactttgaaagggaaaccccatggaactaggccgaattaggaagccttggcactcttaactatggtattatctaagcaaatcaatctgagagcgcaaattacagaggtttacaggtacaaattaatgagctgtgactgttttccctttcattttgaatgctcagattcaataactacttcaaaatggccgaaaacgtagcaaagaagctcaagatctcgtcccccttgattgggacacacaagtgagtgcacctgtaattgctgctcatcctgcccaacctgctcactgatgaaaacagcggtcacttccacgccgacgaggccctcgccgtctacctcctccgcctgctccccacatacgcttcctcccctctcatccgcacgcgcgacccagctgagctagagaaatgccacaccgtcgtcgacgtgggcggcgtgtacgaccccgccattcaccggtatgaccaccaccagcggaccttctcaacaaccttcccgcagcacgccacgaagctctcctctgccggcctggtgtacatgcacttcggcaaggcgatcctcgcccagaagctgtcccttcccgtggagcacgccgacgtagaccttctatacgagaagctgtacacggacttcatcgaagcgattgacgccaacgataacggcatctctgcctacgaccaggccgcgctttccgccgccggtgtcgagaagcgcttcaagaatggcggcatcacgctcgcctcaatggttggcgacatgaacaacccagaccccaccagcccacccggcgagccccaggacgaggacagcctcttcggccgcgccagcacgctcatcggcaacgcgttcgcgcgcaagatgcaccatgcctgcacgtcctggatgcctgcccgcaccaccgtcggcggcgcttacgccgcgcgcaaggacatccacccctctggccgtatcatcgtcctcccgcagggcggcgtgccctggaaggagcacctgtataacttcgaggctgaggcttcgggaaccaaggagattgaccccgccgtccagacatactatgttttgtaccctgagaacgctaccgagggagccaagtggcgtgtgcagtgcgtttccgtctccgagagcagctttgagtctcgtaagcctctgcctgagtcgtggcgcggtgtccgcgaccaagaccttgatggtgtcatggctgcggaggctgagaagaatggccagagcaagatccccgagggtgcggtctttgttcatgctagtgggttcattggtggtcacaagacgagagagggtgctatggcaatggctgagcgcagccttgagctataggttttggctatttgatgataattaaagtctaaaagaaaaagcgcatatttgatgaaccgttctatattatgatatctcaaggaaactatgatttatttttgacacgaccttttttcttcgcaacgctgggtctttagacgattgtaaataaccaatttggtcttgcatgaaccactggacaccacaagtgtctgtcggctggagtgccaggaggacctttttaatttggtgtcagagatatattagacgagtcttgatatatctggcgcgtcaaattctgactgccaattaagcccggttgtttctccgtggcaaacgagcgagaagcctcggtattcggagggtgtagaaccaagcccaagagaatgagcctcgagcctttctcagcctatctgtatagcgctccaggcattggagcactttcccaaatgttgaccgaagcgagtgttttgttcctaaagaaggactggcctttcgtgctctaatatgagtccatcggtatagtccgggagtggagcgtctggtaggcctaccgatttggtgaagcaatgactagccctcagtgacgaatgctcaatgcactgatatcttcaatgcttccagtgccatctccggtagtcgacatgtcctttggttcagcctgggtggccaggtcctcgcgttcgcccattgcccgttggatgagcttcgccttcgtagcggcgcctttaagacgctcatccacgtcattgacagcttcctccgtattactcatatccagggtagctggatcgacgagttcaagaagcgtctggaggttcctggctagtcgagtgctgtgtgatgggagactgggcatgtctttgcagatagacggatcaagggaaagagtatccgttgtgctatctgcctgcgatgcgggaccttcggacgatttcatgtcgagtctctgtgcccagactaatgccttgccgtacaagcggcccatctcgacaaacttctcgaagcctttctcaacggcgaaaacgctgccttcggtatatccggtagctgccccatccgcggtgcccagctcatacccctcattgtagaattgctcctccaaatcaaggagactgtctaggagattgggctccatggtggggatagtggaggtagatatgagtcagagttgaggatgtcagatcgatcacgttttttttttgatatgcgcggggcatgtgaccacttgcttattttcccgccttgcccctccaacaaagacattctcctcttcaacaccgcaagatgacggatccgatattgcccaaagccggcgagcggaatatcctcgtgacgagcgctttgccatacgtgaacaatgttccccatctgggtaacgtcgtgggctctgtgctgagtgccgatgtatttgctaggtatgactcaaccccacacagaatatagaattgcgccatgaaactgactgccactcaacagataccacaaggcctgtggccaccgcacattgtacatctgcggtacagatgaatacggaaccgcaaccgagaccaaggcgctggaggaaaaggtgtcgccggaggagctgtgcgccaaatacaacaagatccaccaagatgtgtacaaatggttcaacatcggcttcgaccacttcggtcgcacgcccacggagaagcacaccgagatcgcgcagtcaatcttcatgcgcctgcacgagaacggcttcctcgctgaacgcaccgccgaacagcccttctgcgagcaacacaactcgttccttgctgatcgtttcgtggagggtgaatgcccccgctgccactacgacgatgcccgcggagaccagtgcgacaagtgtggccatctcctcgacccctttgatctcatcaacccccgctgcaagatcgacggtgctgcccccgtccgccgcgagacgaaacacatccacctcctgctcgacaagctccaaccggatatcgaaaaatgggcccaccctgctattgaaaagggtaactggcccaggaattcgcgcgttattaccgagtcctggttgaaggagggcttgaagggccgtggtatcaccagagacttgaagtggggtgttcccgtcccgctggagggatatgagaacaaggttctatacgtgtggtttgaggcttgcatcggctacctttcgatcacagccaactacacagatgagtgggagcagtggtggcgcaacccggaggaggttcagttgtggcagttcctgggcaaggacaacgttcctttccacagcgtgatcttccccggtacacagatcggcacgaaggataagtggaccatgctgcatcaccttagcacaaccgagtacctcaactacgaaggcggcaagttcagcaagtcgcgcggcattggtgtgttcggcacaaacgcccgtgaaaccggtgtcccggccgacgtgtggcgttactacctgctgaagaaccgcccagagactggcgacactcagtttgagtggggacctttcgtggacagcaacaacggcgagcttcttgccaagttaggcaacctggtcaaccgcgtcatcaagcttgtcaccgcctcttacggctccgtcattccagaattcaccgtgccagagtccttcgacccattcctcaaggaagtcaccgaacacctgctccagtaccatgaagaactggaaggtgcgcacctgcgtgccggtgtgcagacagccatgcgcatcgccgaggcgggtaacggactgatccaagcgaaccgactagacaacgcgctgattgcgaacgagcccgagcgtgccgccgccgtcgtcggcacagtgctcaacctgattcttctgctgtccagcgtgttctcgccatacatgccagcaacctcgaagtcgattctggagcagctgaatacacccttcgagtacatccccagtgtggaagagctcaagtccaccggctggaagcctacttcgctgaaggcgggccacaagatcggcaaggcggcttacctgttcacccgtattgatcccaagaaggcggatgagtggcgtgagatgttcggtgggtcacagagcgaccggaagaagaaggaggacgaggctgccaagcaggctgcaaagaaggctgctgctaaggctaagaagaaggagaagaaggagaagggtcgcgctggtgctcccgaaggtgtagaggcgtctgctaagggtggtgcgcagaaggcctccgttacgaccgagggcgaaaatgatgaggcggttgagaagattgctgatggggttgctcaggttactctgcctacctcgtagattgttgggttttcataacatggcgatctggatgataaaatacatgcaaggcgcggtgtgggggcttttctttttatgattatcgatgagatgttgtgcatgggtcatgaacgatgatcatcttctggccatattgaactagcttggggaattcttcttttttataggtatcacgcatggatgcaatgaagatgttttgtttttgatgacctgatcgacgtcttgatgctatatgttccgcctactcgtaactgctcagctctacgatctatctactccgtacagtgagtcacaatccctagtagatccttccaggaaagaaaatagatgggctagcaaaagaattctcatttgcttaatcaaaacacgccggtatggtaagaatttcattacatgctcgttgtagcgatgggatacgaaagtgattagcgagaaaaatccccccatcccacgcaaaaaagaagaagaaaaaaagccgggggccaaatcaacgcttgcgcgtgctcggtctaggctttgtctcatcaggcccgatagggtgcaacatgaccttgttgacagtctgttgggtattggcggagtaacccttgctccagtcgtagctgacggagtaagcgaaaatatttccagtacggttgaaagcggtggtagtgatagggcctccgacagcgggataacccttgagacggtgcttcgcatccttatcccagaagtggaaagtgccgtcggcaccagccgtgctgaatgtaccatggatggggtggaaagagatagcgttaacagagtagatattgcagacatcgcggtttgtagggggggtttcacggtggcacttgaaggagaagttcgaggcggaatccttctcctcgacgtactgaatagcacagcggccctcgaccgagccgacagcgaagcccgaggcatctgaaaagcagctgactacccgcgtctgccacttgagaggtgattgcatggtcttgtagaactttgttggctgatcgaggttgatgatgttgatgtagcggtctgcggtgccgatgacgagcaatttgttcttgacgtccatggtgtagacacgctcttgacactcgacggaggcaattgcggtggactggcgcaaatcccagtatttgactgtcttgtcccacgagccagtgatcaggagtggggatccgcccacggagggattggggatcatatggcagcttcggatgggagcgtcgtgggcggcaacttgagttgtcgtgcctgaaccgagatcgagcatgcgagctgccttgtcggcaccggcaccgacgaccttggttccatcctataagaagaaaaaagacaatgttagtttctgtgtatgggaactgggctgtgggggaaatacgccgggatggcgagaacgggggtcagcttactggagaccagcagcagttcagaactggagcttcgtgctcgaagagtgcctttccttcactttgcccttggtcgttgatttcgtagatgcggactttcttatcccacgaggccacggccaggtgttcgctagtaggcgagaagcggagatccgagatgccatcctcggggggagtattaagggcgacgtccttagaaatgtcgccggtggtatttgtctggcccgccgaggccgacgacgcgccggcgccgaaaagtgacatttgaaagggcgcgagaggtgtgatatggtaaaggggtatcgagggcgggatgaaaggatgtgagctgaaaacaaagctgaagtcacagctgccaagtcatgcagaagagaaagaaagtccaattcggtagagaaaggaggagacagagaagtcgattgatattgtagctcgccagaaagcgatgcgcgatgatggcagaaaatatatcccaccgccttcgtgcctgtagattttatacttcactcgagggttcttcttttgatcccaattttgtatttgaatttgaatcactctgaacttacatatatatatgtacgcctattctcttaacagaactatagccatgcctatctatccatggatgccatgagtcacgactaccaaggcagcattgccggactgcagttatccgtttggaaaatattttgttagacgatctgattggatgaggctttactcaatggtcgtacttgaggcaactaaaaggataagatttgattcgatcttcactttctaggcattgccgtgtcagtctatacttatcgtatatattaacttgataccgactaggaactatctttaggaagatctataagaagtacttaaactagcgagcgactattcagcttattatactctgctgccgagtcatctttagtaaacaactgtatgcatccataattcacaactattttactaagccaaaaaggacaagaggatatggatatgctggttcacggaccacttatgaattatgaattatgtctttatatctttctagttgttagaaactgtttctgccttgggttgataggacctgctcccaccttgtttgatctccttctctctctcctagcgaacacacaccatacatggggttcctttttcatcactcatccaagagattgttgagattgttgatatatgagtaacatgtctcactatccgacgaatacatgcaatattcaccatgtagatactttggtcaactaggctgcaaatacagtttacaggacattcgagatcggcatgatgaaataatggtcaattaataacgccatagaggaagaaagcttaattacgagcaaccttagaagctcagttgagtttgctggtttgccaccatgttggaatacaaaatggacgtgcattatgccgttaagaatggcctagagtggtcagtttcaccgatgtaggatgatttcaaagtggagatgaaggaatggtatgattgaatttgtagttatagtcaggcgatctcatcatatgattaataaaatctagtcatagagtgtcgtataggtacgtatataagtactaatgtggtagttctagcctaccaccagcacatacgtactcctcttcgtacatataagagtgatctgccctaaataaagtggagccaaatgcggggtgcagcactctgattggctgagagctgatgttgatgtcagttgaaatgatccggggaaggccggtgatattatatttgttttgtagatggtggtagtgaggttgtatagaagagcagagaatagtagagtagagtagagtagagtatagtgtaatatagtatagtgtagtaataatccgtgggagaataatgtgaaacccgctgatacagaggtacttgcttgttatagacaaacaccatataaacagaagtaacatgacatccatgacactgcaccccctctcacacaaccttggtcacctgcctacttcccctctcttcgctccttcttctcttccatctcctgatctttgattcatctcctgattcatctgagagtatattccttatcccatcttgacctttcctgaacttgaccagatacattctgcaaccatgtctgttcctctaaccaaagtcgattctgctatcgctggcttgtctatagccgatgagaagcctgccattaccgagaaggaagtcaagggcaagtctcacaaggagaagcctcacaaggacaagacacacaggcgggcctcatcaacggcagaaggtatctggaatatcaaggaccttggtaagtatccatcaatctcagtaggaaaaccatactgataccgccttagaagagcaaaagctggaactgaccctaccaattgaaacacagaagactgggtggtgggtatctcatctttcctcgcacatagatcagttctcactgacttcggtctaggaaactcaacacctccccatcaactatcgaggacaaggatatcctcaaaatgctcctcgtcactccacccgtcaagaagattgacctccacttcccccttggcctagacgtcaccgctcggaacctcaagggcgtcacaatcaaggacgcattagatgccatctacaaacagttcaagaagaaggtcagtgactctacgatatagaccataaagagtgtatgatgactgacgtgaccccgctaggcggatgacgaacttgacaaaccctacctcgctggcttcgaatgggacaaggaagagtgctggacccggttggtcgtgcatcagaagaaggagggtgcaccacaaccaagcaaaaagtccaagaagaagtccaaggacgaggcatagattggcattagcccatcaacccgggtgtttcatgacatgaacatgaacacagataagtgtccccggatgcccttccaatcccttctgcactttatcccttcacttaccaaccatgataataccgggactattgactcccctcaatctgcaatacgccatttgacttttttgctctgctttttcacagtcccattcggctgctctgtgttcactgcgtttctaatatagaaacaagaactaggagggtacgagggatatttcatattccatctcgtctatcatatttctcttgatcagtcgtttctgcctggcccggcttatgtatctaccctgggtggtgtgccgttcactctttctgacgcctagtggagatcgaatcaaataattttgacaactgtctttttccaatgtagatattgtaagacattatgtagaacccaagttgaggagacaacctgtgattgaagtccaagtggacatgccaagccacactataccggttgacatccacagcttcatatcgacatactatacatgagtatactatagatccatgagaagacggaacagatcctagtcccaaagtgacccccaagacttccgctccctcaaaaaagccttatccgagtacttcggcaccatccccatcctggtatacgccgccttgacattcttcacaacatcacattccaaagtcgaagattccatataataaccccgatctctagcctctcccagacgagtataaaccaccaaatccagatcgcggacgccgaaaatctccaagcccccacgcacccgttcaggaaggaattcctgtccccagaccatctccgtcgcagagtattcatcctgatcccacctgtccccgaagacgagagcttcaaagacgatatccatccgcaagccaccggctgattctttttggtcgtccttcagggagaagattacgaatgtcagctagggttctttgcaagcgggaaaatgatatatagatgtaatgcgaacagatagaaaggtaaatactaggtaactaaatgtatctattacgtgaaaataaagtagagctggacactcaccaacgtttcataaatatacaaatactgtccgccatgcccgacattactccttagtagcgacagtgtatacacgggcggctgctggaccagcatacggcgccagctggcttctggcctgataaatgcatcccatttgcgagggtgcttgaccatatcgaaggtggtgaatgtgagattggaggtcgaggtggaggtgcagggttcatttgtagtgttggtgtcggtatccttcattttaatggtctttccattgctaggaccggattggtggaagattgacgggaaggtctctgctagtagtgggttctgggtctttggtttcttcaatgcattgtcgagaggtcggaagaatagggcccattgtatgggtggcgaggagtcgatgaaattggtccaggcgtggcagattcgggttgcttttgtgaggagggtgcgggtgtccaggttgaggaggattagttcgaagatttcggggatggagagggcgtgagtttgggctgaggttgggggagtggccattgaagtttaagaagaagaggaagaagaagaagaaaatgagctgaagctcagtctgggggattttaggggctctttgttgtcagttgggcacaattgagcctcatcacatgtacacgtgatgatcatttatcttggcgagattatgtggattttggatgtattagatgtgtagatgagcgggcatatttggaattatgtagagacggatgtaatggagtatatacagtggtttaatgaggaagaataaaacattcatttctcatcgagaacggcccgaactcccaaagagaaccaaaacaatctcgtcaagaatcgtaaaaacaagatgggtattaagatgttggttattgagcgtagcaaagatgcgacgggcagcagcctgtgcattagctctgccgaccacattacccgctaaatctggaatgagggtagccaagaccacagtagcctcggcacgactattgaaacgatctgcggctgaacgcggaggggctttgcgaagcacgccgccgggccagagcgtatcgcgagcgagagcaaggtacttgagaagggactcatcctgtaccaggccgcgtgctccctcgcggaccttgcgctctattgtcccgccgaggagctggtgcagaacaacgacgactgcacggccgcgcagccagttgttgccgcggttcagctcgaaggcttcgaggaagagatcacagatgggcttgatgaatggctcgagctcgcggtcttcgaaggcgtttagttccgcttcggcttcggctgctgtgacgacgtcttcggttgcgacgccggattctgggactatcgtgctgatggcttgctgggtggcggcagatatgaggttttggcctgcggtagatagttggtctaggacgccaaagttgccgaggaagtcatccatgccgtctgcgacggagttgtagatgcgtgtgacaaggtctcttgtttcaccctcgttgtcgcgaacggtttccttacggggtaggatggcacgttcagagaggaatgcacgtagatcgcggctgcggcagacctctggcagaaggaggagtttctgcagataggcttcgagagcgagtcgccgtttgtgaaggaactctttctgtagcttcataacgactcgtcgccggggaaattccaagttccggacggaggggtagcgttggcgtagcttttgatgcagatcatggaactcgctgtatcgtcgtgcaacgacccacgatgcggcgggcatttgctcgccggcatttcttttgacctccaccacgtctgaaataactagttagcctggaacaaactgtgcagtatgaacgtctcttacacattgcaaattcacggccatcgtcctcctctttgcctacgacggtagacttgaggctaacggtcgatcgcccaaataagctgttatcgctttcctggagaatgtactgttgccgctgcatttccttgcggtgcatttcacgctggatgctggccttggacttgcgcaggattctcagttccgcggtgttgtttgtcagttctgctttgcgtgtcaatgcttggactacggagtcctgggctgcaagtttgtcgatatctactgagagtgcctcaatcgcctccgttagacccaagtcacctggtgcagcttcgtgcacttcatctgctgggtccttttcatccacgccgtctggttcttcgtattcgtcttcgataaatttctgttgatctggaaataagtcgtcatcaaagaccccaagtcgtgacgcatgatccaccaaaccaagcgatgcgatgcttttcttggttctttcattccggttgtcaaccgaaggagtttcagacaagctgcgcgacgaaggaacaggacggtccgacccgaatagaccagcagcatctcctttgaggtcttcgattctcgcatttttcggctcgttggtaatgatatcattgagtgctgcctccatcgtctcgagaacttggctttggctctggccatcattctcgccattctgcgaatccttgcccaaactatgggtggatgtggccagattgtcagtgtcatagtcgtcatcaaaaagataagcagatcgttctgaatctattgatcgccgtaatgaatcatcatcatcaaataatttccccatgccccgcacatcaccagacgagacagcggctcgtcgaaggtctttggatggtctcaatcccggctgggaactggttctcgacaacaaagggggcagaggtcgcctctcgggagtttcaaaagtgactgctatgggggaggattgccgaactggcgcctgggcagcggatgcttcgtcggacgcaatatacttccagtacagatcagaccccttgaacttcgggtaataagtatcctggagacgctctagaatggcagactgggttgtcaaaaccaccattcgcgcttttcggtattgttccggggtggcgcgctttcctgcactcaggaatgccttgactgctcggcgagactcttcagagacattcagttccggctttgaaaggtaggtttcgctgatgagagctaggtcgtttctgtctgctggcttccatgctaataaagtaggcattggctcatctccaaagtcatcttcaagtgggttgcgcaatccatctacaacaacccagaattgaacaagcgacatcagcttttggcggtccataaactccatgaaataagaaagcccagatgcactgtgcatcacgtcaatcagtgacgattcatgtgttctagatggagcctcaggtcgaatgtctagtgctggaggtacatgggagtcctcgccaggtctcgcaagtttcgccactttctgatcaagaacacgttttcctgtttcaagacgcttcagatagacctgatcctggccctcgaccacactctcctgcttcaattgactggaaacgagggcgcgaaaacgacgggcatcggagaggttattacatttcctaattgccctcacaaagcgctcaaaggctcgctctgaatcggctggtgacagtcgcgggaatggttgcccacgcttagacctaggtgcaggtgacgcatgctggtccagagcggcgcgcagtttgcgtacagtcttccgatcctgcagagctgtacggccatatgcttccattaattggttccatgtgtctgggtccgacaatgaagcgactatcggaataagcacagcgcatgagatgatttcgcgaatcagaaccgacacaattcgactgtttagcacgctttcggggaatagctgtggtagaaggccaaccgctagcttgcgcaggtactcctgttgaacagtcttttgatcggacgccgaggtcgcaacggcaggatgtaagcgaccttcccggtatttgttcgcaatggccagatcaagctctccagactcggtcacatttcgactgagattgcgtccccgaacagaacgctcggcaatgtcaaattctctgaggtgcgatgtcacgataggaaagatacgcgatacgatcagcgacaccatatcctccgcaaccaacctatcccggaggttttcaagagcgacgcgaatcgttcgatcaacttcattggcaaatatagggttcggactgatacttttgtaccacgatgaaacaaagtctcgagtaataaaagacagaagttcgtcgattccttccgacacgacaaaagactggggatagagtggccggggacggtatcgcgtgctccggcggacattcagcacttcctttcgccattggttaggttttatgaaagccaccgaaacgttcttgaggttgactctgtcattctgatgccggattgtgaatgtgacaattcctaaaagacccacagaagctaggacgacgcccagtgtcaaggcatatcctagataccggaggatcggcagccagcgaaccacaagaccccaggcgatgaatacgccgacacccgccagaactaagtcgcggcgactaagggccattctccccacacttttgtcagagttccacggctcataacgatcactcccgggagcttgggagcgaacagctcggcatagtattatggggcctggttggcggggaagctctcgttggtatttagcgtcctggaatggagtcgacgcttggtggggcaaagttcctaggagtcagaagagataaagacgtgtatagcaactgtaaaggcagtatcaatataacagccaagcaaagagtcgagaaagagacgatcccgtgaccgcgcgggagtgaacgtcatttgtgtttacttaagctgttaatccggggccggcgcccatcaacttcgtctttcccctcttcctcttcctcttcttcttatcttcttcttctattctgttctcttcacttttcctgctttaacggttctctgcgccatggcctctcttacggattttgtcgatttttcctctaagcctttactatgtgagttggcctctttacgggatctcaacaatttgcatgtgattgaccccaacagggtccgccgcgactattgctttcaacccaattttctggaagtgagtgtccatcttagtcgagaaaatttcaatcgcaatggttctgcccaggagtaatagctaacctaaattttctagtattgttgctcgcgcaggttggccgactccatccgaggactgttgcgttcgatcttggctaaccggtgaacagagtaccgtaatcacttcttgacccgccttttcggaggcgcaaaaaatggctgctacttccttgcagtcaccatcttctccctcggaattctccgtgaccatgtctaccaactcgctctagctgaccagcccttctacgctcctgttcaccaaccgattgttggaggtgtcttgtttactatcggttccgtcttggttctctccagcatgtgggctcttggtgtgaccggtacctaccttggcgactacttcggtattctcatggacgcccccgtcaccggattccctttcaacgttaccggctcgccgatgtactggggtagcactttgaacttcctcggtgttgcgctgtaccacggcaaggttgctggtattcttttgacggcccaggtatttgtcctgtactggttcgctcttggctgggaagagtaagtggtcattttgaagcatactataactaaactgaccgtatctagccccttcactgctgagatctacgctaagcgtgagcgtgcgcgtgccaagaagcagtaaacgccatggatgtataccaggattggccgggacattcaacatccacaatccgcacaccaaaagagaggccaggttgctcagccaacttgacacccaaagtctgaggttgcccccgacaagtttccagcgcatggacacatccgaatcttcaacgatgctggacctgtagacgatagacctttgccttgtccttgatactatgagtagaacaggacaaggccccacacgctatgatttccctcacgcgactacaaaagatataattcaatccacccatcgcgccaaacctgaattagtaggcctttttgactcacttgtgattgctgaggatgtacaagacgctttccaaattttgtctttccaagcaaaaacgatatctacagcagacaaaagaatgctcgaaacaattgaataaaagtatttaaatctaatattctagaattattttctcagtgttatataacccagtgtcatcgcctcaatttccaatgtgactacacaatgacccagctactagaggacatgtatgaagaccagggttattccaatctttcagaccatattcatatgatcaagtacgctctactttcttcttcactctcggtcaacctgagtcaatatcttgaaccaagcttcagcaaaatccaagcaaagagtcaattgcgcctgctattttcgccaacatgtacctattaatgcatgttcgacttaaccttccacttgcatttgatctcaggcgatgagtgtgggtgagtgaggaacaaatgagaagtcccttcacagcgtcgactccaacgaaaacaacccagttgactatgaagcgaaccatggctacagtcatcaatttgcacacacatcaaatgcgccagacatgaccttcttggcctcttaggaaggactaaaccaagaaactaccgtggaccataccttgccctatgacaaagacatgtccgcagccgcagatgcatggtggttatgatctcaaggttatgggcacacaggacaaggcttgacctttgagattatgggggacgagagcaacaccagtgatgaggacgaagaaaggcaaaatcaagatagcacgtggacactcaccatgcacgtattgtcttctcttcaagtggacttgcgtgccctactgggatggcccatggacattccagttgttatcttttatgtctggataaatgaaagatctcttgtacatccagaaaccacgtttattatagaaatgagggtatataccgacgccacatgaatcaaagagcccaaagagacagagacagggtagtatgtatgggaatagaccaggacatgacaaccagaaggccaaagatcaaaaagaagaagcaaagaagaacagcactgccaacagcccatccctcactgccgccttcccctccccctcttcccctgcgtccgactctcgtcgacagtctcaatctcatcctcatccgttcccttcttcaattcctcaccctcagctagcccccactgctcacggtcataccagtcctcgccatcactcatctcgccaacgtgtccctcagccttacaccattccagaacatcacctttcatgcggcaagatctattcagcgaatcgagcatgtgctccaccccgcgcaccgtctcttcctgcttctggatatacgaccagagcaggcggcgggtttcctcggcttcagcggcaggtaggccgaaatttgggtcggggaggatgttgtccgggacgaggaagagggggtgcggtgttgggagtgggaatgctgagtcggaggagagcggggagccgttttcgttttcgtttgggttgactgcgttggcttgcgcgcgcgttgtcattcgccgtagtggttctggtgagccgtcgtgcatttccaggtcatgttctgtgtcgtcgttgggttcggttgtttcgacgggatcggcatctttcgttgtgtctatgtctggtctcccgttggagggtgattttgtgctcgccccggatgcaccgttgtgattggaagtcgagatgttagggtgaggtggcaggtctttaacggtggcatcggtctcttctgacttaagctgcaagccgttcttggtgggttcaccatctgctgggacctcggccatttccacgtcattttgcgttgaaataacctgggcttttgttccgttctgtgccgactgagggtcctgggtggctgttgatgcaggtgcctttgtggtaatacctgtccgaattgtaccctgctgaccggcatatatgctcggttcgttactagcaagcctggggtcgaagatcaagtgatcgtcaggcgtctcgagcacaccgcatggcatccaactgctatcacctagaaactgcctatgcaaactcctggcgcgccagagcaaagcccgttcctggcgaagcttgtgttcgactgccgctgtcattttctccagggcttgcgacgtgtatgcttgggacatagaaggatggatggggagttcggaaggatgcttcaggggacatagaagagctagaaagaagaaaagaaacagatcagtcatgaagccacagacagtactcaaaaaaagaagtagaaaatcctactctcaagcgcaatcccagagaacgggttgtcttcagcagccgcggcatcagcctcggaatcttcatcatcttcatcaagctcgtcgccctctgaatcatagcgaatcgggttcggctgaagaatgtagcgcgtatagccagcatgatcgattctctaatcaccggtcaaagttaggataccagcttcgtcttatcgccacagcacccaagtcccgaaataggcaaaccacgcacctgcttgtagtaatcttcggcgttgatgtaacccagtgcaccctcgctcacatacttagcattagcttgcattttgttcccccggttcgttggcgccatgatcggatcgtctggaccattatctggggaagaagtatgttagaaaacaatcctgttgaaaagacagactacttagtttgtaactcaccgtcacgttctctgcgcaaggcccgcttcatgcccgtgatggtatcggcgattaacgccgcttgcgccgtcatatttatggtgtcggtaacgaggctgtcgggttagacaagttgatttgcgcgtttgagggggttcctccagtaaaatgaggatgtggcagtgatctcccgagcagggaaaagtaagaggatgagtatctcgacgctggggcctcaattataacgcagggaccaggggaagtgagctgtaatgtctttgagtgactgtgatgaagctctctggcggcaagacatgcggatcgatcgccgctagccgatttaggaaatccgggttatgtgataagggctgaacacgtgacataccctcatctatgcagagtatgaagctgaagatgtttattttatatacaatatttgctcatatgagacaatccaattcatctacggcatgtctctcagatcccagttatatcattcaatcgtcggcatcagcccataccagaacccccttcttgtccgacctcatatcccccgttggaaggacgcggagcgttttgttgaagtaggtatcaataaccaccagctgtggccgaatccataagccacgcttcgctgcaaacagattaaagaccactgtatgacggctcagcggtacaagctgcacaacggtgctcttcggcccgctaaaggcaaattgctcgctagcttccatgaccaggttgaacgtaaggaagtgggtagaggggttctccagtacgtaattcaaatgaatcaaccctgccatattgctggatggggtagccgatgcaaggactcgaggctcgcccatggggacgacaaatcgggggatatcgaggacggtggttgtgaccgagttctctgcgtcgtcggaggacgcagattcagatgaccgccgacgccaattgacctccaatgcacaggtaagcgcagttggtcgacgatctccgagaaggagcttctggatatcgaggcagaagttggattctcgcaattcttctggtgcaatatgggatgtttctggagtgacaagctcttctgagtgtacctcgcaaatagctcccccgttggcttcgaggagtctcagggacatcttgtcaattacaagcggctctagtgcaaaggaaactaccttggaattgaggcaccacttctggaacaggcctccagggcttggcgcagagccatcctcgagtaagttatcgctaactgcgaagaaattgggccatggctgagggtggattgccggcaagaactcatagttcgcttcaaacggccgaatgaatgatagggccacggtgatattcttcataattggtgtctggatatcagacactaaatggtacacagccgaaacctccaacgtgaaatccgtggcctcctgggtatcggccagcacaattgtaagagttttgttagaagagcgctccagaacacccacagctcgtttcaagtaatgagaaggcccctcagttggggtgctggcgcctgagtcagggggttcggaactagaatcgtcgtcaagccactgtatttcagctgtggattcggtaccgaagagtctgatttcagcggatacatctgcagcttcgtcttcttcattgtgtataccgatctgcagcatcaccctttcattggtataataggtagccttcagattgggagtagtgaggcggatcttgggaggcttaggcatgaccttgcatctgccagtatcacgatccttgcccactcttctgcgggtcacgcccttttgcgtctgctgccaccaggacgattcacgctggcctggctcggtgatcgcataacccaaatcgaattgctcttcttcgatcagcatggtgattgaagcaaccttagcttcaccagcttcgcggggaatacaggtaaggttgaagaccttggtctgggagggccccagagtcaaatctgctataccgaccaatgcggtcagtccaccggccggggattgaatcgcggtatcagggttgctcggctcgcgtagtggaagagttgcgatgcaacatggggttgtagtgtcagcatgctgatcctggtcagactgaaccttcactgggcgaagacatccttcgaaaaccagtttgacttctgagagccggataggggccgatgatttatgagcacacgaggtgatggcaagttgggcctgtagaggttccccaacgttaccattggatttctcgaacaccaacgacgcggtcactttgaagacgggggtcagtgtaatctttgaattttgggcttgcaaacttacaactcgttattacatcctctgcacgaaggataagagaaggtttgggcttttctaaaggtaaaccttcaagactcctgtggatgtcataatgccatgcgggtcttggtttgaaagctatcagaatgaatgttaatactgaaaacgataggcacaagataaatggaattaactcacttttattcagcagctcccagtccactcgcaaaactgtctcgctgtcctgaaccctgagggcactttctctgagcgcccatccgaaattgaccatcagatgccaccaccctgagcggcgccagctaagagtagaccacagcggtcgaagaaggccatgcgcttcagaccaggagccaatacgcatatactcctcggccgcctcaagactcaagctctcaactttccttgtttggtggcgtttcgcgaattcctcgatagcagctttcagcgtattcaatattaggcccgagtggtcgaagccagttcttccctcttggggtgcttcagcataagggccgggaacaagatatgtgtcatataagtaggatttgtttgcgagttgtgagccaggtgattgcccagggggcttgcgatcttccaaaggaatcttccgggcaagcgcacgtcgtatcattgtatgcttcgctgaacggtgtagccagtaaccctcgtggtggagattttcccaaggcctgactctttccccggttggaatcgatttctcgggtaaagtatagatgtctccaggttgttcagaagatatttcgctggagatggacggaatttccgctcggcggataagctgtgccattaccatcgaccaacgcgcctcccaggcctcccatccgtagtttttactcccctttcctctgcgattgacaatatcctttacgcgaattctgtgatcaacccaaagccgagctgcggcagtcgtctgtcccgtccataacaaacaacgtataatccgaatggcaagggcgtcggccaggagacgcgcatcgttaaatcgaggattccagcccgcgatattttcgaaaacttcatgtccaaatagagtgtcatacgcgctctcatagttccgacaggctgcatccatttcttgacgaaactcggcaaaaattccaagcttgaattcataccttacgttccagccttgggacgatagggtttgagatgttccagtcgttggcggtgcagtcggaggagggatgctgcccctatttcgtttacgcctggcatgtttagacagatcacgatagtattcaaccaccgacggttgcagtagagagaagagtgatttcacaaaatcttgcagttccgacgaacttgcgtctggtgggatcacaaatatcgacctgggttcaaggtttgttgaccgccgaatccccgcaatgcggtcatcaatctcgccctcatagccaccttcttctccgtcttctgatatcagaacgaccacaaatcgcgtcttgtacccggaggattgccattcctttttcaagctgttgatctcgatcttgagttgattgtctcgtagcgaattcatattcgggtctaacgagaatggaaagaaattgatcactgctgccggaaccagttcttggtgtttagttacccatagaggggtgagcaagccatctgggaaagttggggaacctggcgacaaaggcgatattggcgagtggaggacatagtgcgagctaggttccgggtgttcattgtcctgatcatcgctgggggtggttggtggtgaggggacaggggggtcagcttttcgtggagggagtctgcatgactgtgttggtgttagcaagtagtccgcagtatgatgttgtggaaccaacaggattggaatcataaagtatcaacgtacgcggccagaacttttgatgcggtaaccgatatttgcagtcgtagtattcccgcttacggtaactctggacttccatggcatctgagagctatcttctagaagaagtaggctccggagctcctccgcaacagccccgctcagatgtgggaagtctgaaaagatatgggtccccttctctgatagcagaggatagctcaaggaagttttagtgtcattttcaggccctgcctccagtcctgagagtaggactaaaggcaggttgtgattgacgtagtcttcggggtaggcgtccattgcgggcaatggcagattcgcagcgcggtcaccacatgtctagaggatagagaagagctggggatttaaggagcaagatataaaaatcccggcgattaatgagactaatgctgaaatatgcttcggagtttcaatgatgttttgggtaagataagacaatggctggggaatactgccatgttgccacgggcggtcaattatgtttacacctatcacaaggatagaagttgacctatgtactagttactccatattattgtgacatacgtagattctacacgcccctatatacataggataatgtccgttgggtacggctttcctctctaggctgccgtcgctttaatgagggcgatcaggcttaggtcaacacaggctcaagtgatctggtgcgtgaagtcatgtgatcgctagtcaccgcttactcacccgcctgtctgatttttcggcattcagcttaccgccatttataccgccttagtgttgaactccctagataaattgtcacgatctatgatagatcgctatgatatgctttatgtttacttgctcgcttactgtttgcatcgtttatctcattagataggttgtttgctagatttctaagtgagaaggttcgaggcttgcaacgtttgcaaagggttagctatttgcgtcaatgccactttctggccatcgcaatgctatatcaacaggctgcttcccactgtgcaacttgcttcttctttgtttcttcatcttcgttatctagttgatgtgcactttcttcttcaagatcgacctagcacctcacataaaccacacttatttatcgtattaactacttcatcgtcaacaactaccaccaccactgtgctattagtgatcctactgtgccaatagtgtttactcaactagtcttcaaccacttcaacaactgctccaaacccagatcagttatcgacctttcgccgtcacctccgtctaagccttctcggcaggtaaccaactctgagccaagccttctcggcaggtaaccaactctgagccaagccttcctatcatggatcagcatacggtactgagcgcgggatcaaccggtctcttttgagcgccgaatccaccaaccttctcaacgatgaggcattgccaagtcaatatctacagctaaacacacggtatgtcttttaggcgcctggcacgattacctcttcttcatttccacctatctaactgagcaaagtgaatatggaaagcggtgggaagtgagaagtgactttaagtgttgctcccccacccaactttccttcgaccaatcgcactcattcatcatgaccttggtcttgcaacgggggtatacaattacggctgcgcccatccaccattaacaacccatcttgaagcggcccatatcattccatttatacttggatcctttcatggcaaggcagtggatatatatataaagatttgggttaatctaaggcgctactttccagctcttcgcaatatgtccctttacctcagaacagatcaattcggagaagaacgttctgatgctagattctcaaatttatagggaattcggtcaattcagactcatttttgaagcaaccggaattgctcaccaatatcaaatcaagacctttccagataccgctacagggtcaatacaatttttacctagaacacggaagttcaagagttcacaaaagaagttgggtacttccagatcctaaacttctcaaaattaacgcttgcattggaaaatttctacatatgagtggccaggcggaggtaatcgacaaagtcctgggtaattttgaagtctgtggtgggcttgccccgagtggaagcaccaacatcgaagaccttcttgcactaccctcaaaagccaacgaaacgtccgattcgcagaagtgcagagaagcaacgtcctccggagaagcaaggacgcctacgggtgacatttgctgacactgggaataaaccatgggcatactaaattgcataatcggttatcacggtcgcagttacatgttaggccaggtgatggaccggccactatctttagctaaattcttagttctgaattcatcaacagagagattcagtgatattgttctgctgtccttgttttccgtaacagtcacatggggctctagaataatcatggttgacaattatctgttcgaatatatagatccgagatatatatttgtttactattcttcttcgcgttcaatgttggattcgaatttatagtacctggagcatgcatttctaattgggagctgggtatttacttattcagtacatacagactctgcagtattattctaacatgagttgaccagtatcctcgtatagcctgttaagcctattaagggggtcctccaaaaggagccatttggaatccacgtggaacctcaaatacttagacctccatagctgtgaggaatctaatatatccataaatacacagtgtctgaggtagttattgatattctactccctactccgtagtcccctacttatatatcttctatcggcaaattaagatcctcagtggagaaaaaggcgtcaacgctaatctccaagaaaataagacaactcccttttccttcccttaactccagtctataatatatttttcgctctctcttttcatactcggtataatcgggatcctttctttaatcttcttacgctcactcccaatccctaatttttttggctatcatcaatatctcactgtaagggggggttgacaaggttacaaggaccagaaacccttatcaaacatctttcgcatgcagtagatcatgcgtgtacccattttaccctgcatccgatccttgaagtttgtctgtcttagggattgcacccttagactattgaacaatgtcgaacgagaaccccgtgcaagcagagtcggccctgcttagtcgtcgtcgccgtcgtaaatcgctgccttcgcgcaatggaactgatccaacctcgcctgaagtcatttcttctctcatttcgtccctttccaccatctccgttcctttaaactcgcactttgacaccatcccgaagatcgacgaatcagacccagcgttgccagaagtaccgcgaaccgcgccaattcactcccttcctccgtctgagcaacatgggtttggaatgagttacggtaactacaagtcagcggtagagcaacccgcgctaccggagaatccatttttacaccccgacgatgcggcctcgtcgcctgtcattcgcatggccagggcacccccgtcaccaaagtcgccccgatcgccgagattcaaacccttcaaaacgactgatccatcatccactcgcccggcttcgagagagtcctatacatctgtgataggcgccccagagccttcttcgttcggaacgatcagcacagagcctggaccccgtctgtcaaccccgagcatcgcttcgaatagttctgcagggcgcgcgaaaagcctaaagagtcaatttagtcaattgaaaaggtcatcacgcgaattactctgcgagaaggatccacacgtcgatcgtctgcgaaagactaccagctacaacgacagtctacgacacaacatcccgcgcagccgagcaagcttgcgctcattgcattccatggccgaggttagagaggaggcgcgtcctgcggacgtcaaggaagagccatacgaagcgaaagtcgccagaactccaccaatcaaagattaccaatcgttccacgataccccggatgctggcactcccggcggaattggaagcggtagaatcatcccaactcgcgactcatctctgcgccatcggaatagccagtcatccacctcaaaaaaacaccggtctgcgcatcatagtcgatactcctccacggctagcaaagagcttaatacagacaatgggacaccgggaacgaacaatgacgcagaacaggtgacccgccggatccaagagttgaaagaccagcaacagaagatcaagaccgagttggaagtgggaaacagccctgaacacccgactaagacgagccccgtgaagcaaacaagggcctcgaaggcaaaggcatcgcgcgttctaggatatgatgtcgaccaggccatgcaggaggaaccaggccgcaaccatccatctttcagcgacagtgcgccttctccaaacgtgatgacggggaaaaatcgcaccgggagccggctaggggcaccaatcacaccgaagtctacccacctaccaccgcagtttcccaagtcacccacggaaaacctggattctgagagagctagatacagacagtctctcgaaccaaacacccatcgccgcaccccatccggtcatctgtctcatgtgtcaaatgggcgcccctcgtacagtaccgaacgaccatccagtgccgattcaattgatctcgctgttgaagactacgtattttcgccgaagctgacccagagagtgatccacccaaccactggccgctccattgccttctctgaagttggccatccgaagggccatgttgtgatttgctgtgtcggcatgggtctcacacgatatctgatggcgttttatgatgagttggctcggacgctcaatctacgactggtcacattggaccgtcctggagttggggagagcggtccacaccagggagacgagccgagcacccctctaagctggccaggtaagcaagactgtcgagacattttaatattgcgctaatcaataatagatgatgttgcaatcgtttgcaactaccttcgagtgaccaagttttccatccttgcccattctgccggcgcaatctacgctcttgcaacagctctccgaattccgcagcatattcgtggccgtatccatctcctagccccatggattcccccatcccagttgtctaacctcggttctaagaaggatcctgcgcctaccaacgcggtcccttactcccaaaagattcttcgtgctctccctacatcctttctcaaagtggctaattcaagctttatgagtgccactagtgccagcattactacaagtttgcccaagtccccgcgacggaccaagcgcaaggttactgctacagaagcttccaatgcgaatgccatccctctagtaccgcctataccttctgttgaaaacaaccagcagacccgagtggacattttgccgaatatcaaaccgttcgcttctaccaccgcttcgtacataaagagtgaaacggctctcgggtctcgcgcaaagtctccagaagatgagggcgaacggcagcgtgactatgatactcgtctcacctacaagatctgggagctggccaccaccaacgccaacccggcggttgatttgctgatctgcctcgagcgtcgccaaacaattgggttccgctacgtggacatcacgcgatcagtggtaatccaccatggtagcaaggacccccgcgttccagtggagaatgtccagtggctcggcaagacgatgcgccgctgcgaggtccggatcctcgaaggcgaaggccacggccttatggcatctgctggtgtcatgggcaatgtcttgactgagattgctaaggagtgggaggactggacgatccttgtccaaggcaaacgccgagccactgtcagccatgctgcacggcctggactctcgattcacacttgatctcccttgtctgccatctttccccttttatccggtgtctttgacataacacttcatcttcagccctggtggctcatctttccctaattgccatcgctctcgtttcgacaggctaagccgcagctggtctgcggcttccactgctctgatccacaccttgaaatcctatcttttatccttaccctttcttactcgtctacacacacctactttcgaggttcatgccctctctatgatttactgtcgacatgggttttgcctttgaacaaacgagcccgtctgatttagcataatacccagtcatgccatatactaatcaatattgataattcaacttgacttgtatagtaaaagaaaaaataagacacgaaaacaagcatatattatttacatcatagctccgccaagcaccggggtgaacccgcaaatcagggatgacatacccttgtctccttgaccccacttctcctgacctgtttagagcttttggtcttgtgattgtgagttttggaagattcaagatcgaatgtgcaagtgtcgaatgtccccaatactctaaactgcaagctctgccgggaacggaggaattcttggcttctgaaacacgtcacgttgtctggaagtcagcttggaccctgacgacttggaacattttggatccagcttttttgaaacaatccacaagccacacagctataagcgcaatccgccatgccttcttcccaacggcggcttcgactgatcgtcgttgtggtcatcgcgcttctttttatggtcttttactacaccgtgcgtcaccggatctcccccttccacactgtttcttcagatatctaatacgacgcaatcggatccacagggtgatgcaagcaaaatccaaaaccaaaagttctatcggtcaaccctcgacgcaatgaaagcgaaagagcaagctaagcaggccaaggcccaagagaaaatccagaatcccgtgcatgcgctcggacagaatggcgctgcgggtgcgggtgcgggtgacaaggtgcctgtcgctgcggccgagaaagctgctgttcctcctgctacagggaatgaagatacggaggagataccgattgcggggaggacgaagatgaccgttcccaagaaggtgaatcaggataagccgtcagaggttcagtcggagatcaagagcgaggaggagaaggagcgagaggaaaaagcgaagagagagcgtgaggagaaagagaggaaagaggccgaggcgacaacagagcttaatgccattctcaagcgggctccaggtatgtttctttcccccgttttccatttctggcccgtatccaataccaacaacatccagtcatcgtattctccaaatcctattgcccctacagcaagaaagccaaggtgatcttgctggagcactactctatcgagccgaagccattcgtggtcgaattggatcagcacccgcttgggccgtatctgcaggccctgctcgcacagagcacgggtcgtcgcactgtgccgaatgtgctcgtgagcggaaagagtataggtggtggagacgatattgcggcattggatcagagcgacgagctggcttcgacgctgcgacaaatgggtgggaaatggatcgtggacgtgtcgcaccaggcggttgagaaatcactatgaggttagtattgtaaaacaagtttcaagttttaatagccatagcccatagccatggcagacaattagggggcatattgttgttgcagctcattgcattgtaacagagtagcgaacttgcgcaggaactccaggcagcttaatatttaccacatgtacctctacttgccaagcacccaacttacacctgtggggcaagtactggtacaatcagcgataaggcgataagctgataaggaaccctaatcgcgctagacccaaaatggccctaagcgacgcacaatcccgtgacatccaatttcgctccaccaccaagtccattcgaattttgaacctccccgacatcgacaatctacacccccggcaaccaccaaaagtcacgtcaagatgcggtacattcactccgaggaacggctgcccattctggacaatggtgagcgaatttctttttttattggaggatggaggaagccgatcgcacacaatacaacttctcttttgaggcacgaaattcaaccacaagcctagcacgacacacgatcaacgtccaacaccaatacggcagaagtaggagggaatattgtgtgggatcggcgactcgcacacctaccagacaattctcgattttgattcttcaaaatcttgaattccacaaaaagaaatgccatcaactaacccaaatctcttttcgctctatagtgaaggtccagattaagtcccgcgtcgtgactgtcgagggtccccgcggcaagctcgtcaaggatctctcccacattgccgttaccttcggccgccccgagcagaacgttatctccatcgagctgcaccacggtgcccgcaagggtgttgctaccctccgtaccgtccgtaccatcattaacaacttgatgatcggcgttacccgtggcttcaagtacaagatgcgttacgtctacgctcacttccccatcaacgtcaacatcgagcccaaccccgagactggtcgtgctattgtggagatccggtatggaaccctggaacctacattctttttcgatatgattttggaatcataccgcgaaaaccaaattaagatgaaattagagctaacgttttgttattagcaacttcctcggtgagaagtacgtccgccgcatcactgcccagcccgatgtcgacatcgctccctccgccaacgttaaggatgagctcatcctcaccggtaactccctcgagggtgtgtcccagtccgccgccgacatccagcagatctgccgtgtccgaaacaaggatatccgtaaggtgagttgacaaacaagcatcttttgggaggacccgtggttctgaatctatactaactattcccagttcttggatggtctttacgtgtcggagaagggcaacattattgaagagtaaatgtgccacttgggaatgcatggggtgtccgggagaggtttctttaatttcgcctacttgcatatagggaagcaaagcgaaatgtcaaaaacaaaacgacccttttgaaattcactgattcccttacgcgaaaacgtctttgtatgtggcatgtagaactgtgcgcccgtggcgattctattacttcattactttaatactatgagtattgagtagagagatatatatgtatttgtcgcggggctgtagctgaagatgaagatccgggggaatctggatcgaggtccaactcttcaacctccaacctccaacagaatcccttcctcagaattgagaccattcattttcataatacatctatccttgactacgtataatacttaatcactcaatccaatactattacaccaaattttaatctccaatccctaagcggaacgtgcgtgacgtcgtaacatgtgaaggcgaataccgggcccgcatgtgcacctctgcctccaccagccacaacgcagacatatccctcgaatgaaaatatggggtcctggtggctcggactgtggaatatagttggggcagtctggaatatgctgcttgacgttgctcagttctggagatatgtgagtgttgtgctgcaatcccagtcggagtgtcttatatgcggaggtctgagccggagatagcaaagacaaaagacgcacaagacataaaacatcggatatagtttctgatctgacctcgagctaacatatatatcctagaaactatcatcatggtggcattccaaatcccctcgagatcgactcttctatacgctagccaacgcgaagagctatgaggattgggaagaggcggcatttgagctggacgagctacagagtaaagatttatggtatgagattaaacagagccctgctcaaaatgcaatataccaaactataatctaaccacctacacaggcgccaaaaccccgtcagccgacactacgactaccgactaatcctcggccgactggaagcactgatgagcgcgcgcgagtcagaagacatcctaacactagtaaacctgctccgatcggggctagtgagaaatttgggaaacataaccagcacgaagttgttcacgcacgcgtacgcaggaaccaagcttctaattgacgattacatcacgcaagtagcgctgtcaatccagtacgtgacatccgtaccaggagcgccgatgcatccgagcgggttcagctcccaagcgaagctggagttgctgcacgatacgcggcaggcgtttggacgtacgacgctgctgctgcagggcgggtctgcgtttgggctgtgtcatcttggtgttgtgaaggcgctgcatttgcagggtttgttgccacggattattacgggcactgccagtggggcgatgattgctgcgcttgtggggattcattctgaggatgagttgttgccgttgcttgatggggaggggattgatctttctgcttttgatacgcggaagatgattaatggtggggtcgaggagagctccgactcgggttgggttgggacgttttatcggaggttgaggagattgatgaaaaaggggtatttgtttgatgttggtgttttggaggaatgtgttcgggctaatgttggggatcttacgttcgaagaggcatacgcgagatcgaagcgcattttgaatatcactgtcgtgacgacggggaaaaacgggacaccgaatctgttgaattacttgactgcgcctaatgtggtatgtatttctccccttctcgttgccagtctcagtgatatctaacaccattcctagcttatctggtctgcggcagtagcatccaacgcctcttcctcctcaggcctctactcacccgtgacgatctactgcaaagatgaaacaggcacaatagtcccttggccacacacacaagatgcagtcttccgaccctggcgacacgtccactacaacgaaggcgaatcccccctctcacggatctcggaactcttcaacgtaaaccacttcgtcgtctcccaagctcgaccatacctagtcccgttccttcggtcagaattgaatctcctagaccgacgacagacaggctggagtaatctctcccgttccacaatgcgactaataatggtcgaactgcgccaccggctccgccagctcgactacctaggcgtgctacctgctccggtgagcagaatccttatcgacgagacaatccccgggccaaacctaactctcgtcccggacttgagtttctgggatctaaggaaactgttccagagtccgacgaaagccggcatcgctgactgggcgcttaagggcgagaggggagtttggccggcgattagtgccctgaaggttcgggaggcgattgagattgagcttgatagggggtatcagcttgttaggcggcgtagaccgagtgatccttctgtttcggtggctattccgaagcaggttaacgctatgaatgagggtgttcctaggcgtaggaggggtggtagtgagaatgacgaggggattctcgctgatcgggagtagtattgggttatagggttattttaagtaatgcatattgtttctatatttgtatctgcatgtaaatggtatacttcgtactcggtatacccaacacgcgtagaactatgtagacctcgatacttggtcatattagggtcattgatccatttaattagtaagaatgaactgcaattacaaaattgtatgcatatctgctatccagggctatacatcaatgcctcgtatacaccacaacctctccccattctcaatcaagagcatccgactcaggcggacccttataatctaccaaatgtcagcataaagatctccagcatccagcatcgtccataaaacttacatttcctcgcataaaccacataccaaaccgcagaaatcgccataaacccgacaaaaacaaccgaagcataattcatcgacacagccgtaaccggcaaagcagtcggcatactaaacagcaccaactcaaacgcaatccaagccaacgcaacaacattaacaaacctcccaacaagacctccacaattccacggcgccttcgcaacctcctcccgaccatgccacagactcaaaaagatcggaatagcataagccgccgcgagcgcaatgacgcccacagaaacaaacgcggtaaacgcactcgaactcccgagattaatcaacccaagcaacatctgaatggcggtcaacaaaaccaacgcccaaacggggacgccccagcgctcgtcgacgcgcgcccatagtttcgccagcggaacggcgtcgtcccgggcgacggcccaagtcgcgcgcgaggccgcaacggtaatgctaatcgagcagaagactgtaatgaccaggacgagggagatgaggccgagaccaccggcgtgggagcccattacgcgagccagaatgtaggggagggcttggcctgctggggcgttgatgatgtcctggagtgggggcagggttgcgcagatgggaatgatgaagaataggcctgctgtgccgccgacggggacggagagggctattgcgcggggcacttttactgctgggtctgtgcattcttcggccattgaggagatcattcctattgcggagaaggtgtatgcggctggaaggaggccgatgaagaaggtgaagtttccccagccggcgaaggatttgtcgtagtgggctagggtgtaggatgccgagtggcggcctgtgtctgctttgacggagagggcgattaggatgattattattgtgaggagggtccaggatgcgcagagggtgtcgactaaggggaggtggttatttgcaaagatgcagattgctaaggaggtgaggcagactgcgtagaagattaggaggagttgccagtcggatgctgaccaggttggatggtagattgagactgttgctgagagcatggaggcaaagccgaagtttacggagagcgtgatggtccagttgccgatcagccaaatccaggcattgatgaaggagagggttgttttgttgctgcgagagatttggaaggtccagtagtagggccctgccgaggttggatagcgggaggcgagctcggcgagggagaaggcgatacattggtcgaggaggcagacgactatccagccgatgaagattgagaggggaccgccgccgtagatggccgagaggagagctgagccttcgccgtacgggattgctgctatggcgagggtttggaagaggagggttaggacagagcgattgcgacgtagttcttgcttgtagcctagacggtctagttctaggttctcgattgtgccctttccatgatcttggagggagggaggtgaaggggttatctccttctcgatagacatggtgtcagtagcagggttgctagtgagggcagtccgccgttatcagggtctctatagtaggcaaatgaataggaccaagaaggatatacggaggttatatgccgtgcagtcatatgccgaggtgcaacgaatagcatgtcgtgcaagggccgaagtacagatgtaaacaataccatccgaaaggggaatctcgcattctgcaatcgataaagatatacaatttgtggctggtggaataaaacggtaatgggatatgatttaccgattgggagcttcacatacagagaaaagagaatcaagagaaaagggccgacgttcaacattacaaggcaagataagagaaagcttgacgccaggcctaaccctaaaaagcaactatatccagagggcaaagtactccgcatttgatctgcgagattggcttatttgataggcatctacgaagtggataagacaaaatagaaatgcaatagtttcaaggggaaaagaatagaggtatcaaatagaaaaccaccaaaagaaaaacaaagaaaaaacaaacccctaaaaacgtcgaggaatatcaaacattacgaatagtagcatatggtatatacagggaaccccctacatgggaaaagaacaattacagcgctgtcgatggtcgggcctgggacctgcgcgagtgcatactaagccggtgaccggtggccggtggaccctcagtagcgaacagaggggggatactaaatccatatccctcggtagtagcgctacggttctggggatcgatctcaacacggacggaaacgtcgagtccgccaaacatgccgctcgtacaggtgaacccatcagcggcgctgtgtgccgttccggcattgacttcgcccttgtgcagtggtgcatggccgtctttaggaagacgctccagtttcacggaattggattcgaggacaccggtgttaccgggccctagggcgacgacctcggtgaggatggcgtagttgcgggatggcatggtgactttgttccaggcggcgcccttctcctggccgccaggctgcttgtcgaagaaaggcatgagagtctcatcgcattcatggtcgaggtggtggattttgtttctacgagcgaggaggttggcgacggcctggggtgggggcttgtttgtgatagcgctgctgacgacgttgacgatgaagcggtgatcattttcgcctgcaaggttaagtttcgggttggagtagaagcggccgatggcggcaaggtggacgtcgccgccgagaatggttacccgcacgctgttgctgcgggcgaactcctgcaggcggtggactagcatcttgcgctcgtgcttgtgctggcgcgcggtgtagtggtcatccagatcgtcgagtagatccacttggccgtcgaattcattgaagaggccgcctgccaagccgaatcgcttgttcagtagtcggatcggcgcgatcaagggagacgtgaggatgttctcgagccatgctagacgggggtatgcgatcgggacgcctagtaatactatcagatgcttgatgtcgccgtcggcggcgacgatctcgcgctgcagccgttcgaaaatcatatcgtaggtgtcctcgtagttgacctggtgacgggtgcgctctgttcgcgcatctagacctataaaggcaatgcgcttgccaaagcgcatgtagagacttcggctgctctcttccacgtaaggaccgggccgtttgccgatgatccagctgtcgtcctcgacctggttctgcagaacgtaggtattctctacttgacgcgggtcaacacccgaagttccattgacggcatgcatagtctgcggggaatcggtagtgaaagtcgacataggaggggcaatgtggtgctggaagagacagtaatatttgaaagcgacaccgccgataccacggaagacagcacacttcataaaatgatccgtgtatgagccgaacccatcaataatatcatgatcatcccagatattgacctgaggaatgcggccattggcagagcggaatggttcagtgttgtaccagcggacatagttggcatagtagtagtcatcgcaatcagcgcgcatctgattattgaagtcatggttgcgcctcttatgcgggttcgcaatcgcagtccaaggcttgagcgggccatccacacgaacgccgtcattgtaaatctggtcaccaccgccaaccataacgtggaatggcctctcgccatgcaggcgcatcacatcgttccatagatttggccctacccaggcgttcatgtccgtgccgacggaaaagccattgcacgagtggaacatggtacgcatggactgctcttctgcaggaacgacaaattcccacggtgccgggacctggacttcggactcgttgtatagaccagggatgtcgtacgcccaacgcgcctcgaatgcggccaccggcacggtaagcgagaatcgccagaaagctttcaggggatcctcgtagagcttgagaccttcgattgtttggtttgttggaaccctgtcggtgccgctctgggcctcaatatccacggcgcctacctggcgcaggcgcagctggggctgctcctgggttggcttggtgacaatcaagatactgccgtgccaggtggttgtagcctggtagtgcatgttcttcaggttgatcaggggaccggatatgagctcgaagcgatcgttcgagccgcgcgtggtctgttgtcccgtctccccattttgaggcatccctgcgattgccgacatgcttcgattagctttgcgcgactttccgattgaggactggggttccgcgacataccgttgacaggctgcgcactgtactcggccataataataatagaaattgatgcgatttggatatcaccggattgtagaggagataaataagaacgtcgactgaagtcgcatagattatcaagattcaaaccacaattgagcgaaatgaagggggggtaaacagggatagaaggaaggaactaggcgtacttgaatgctatagggctactaagtacagggctgaaaaggaaaacaagaaacgaagcgagattggaagctgcagatctgtacctttgggcccgctggcttggcaataaaggaggtcgctgctcaaccccgatgaacagccctgacgctgccaagactttccggtaattacctggccaatgggagaggagattatgctagccactacccggttgagccacctcgcgccacataagtggtttctggctattcctgattgggtcaggagtggtggcggtgcaattttagctttgatcgggttacataagtgggtttcttctgattttgaaggttttttgttcaagagcatcttccatatgatcaaatatgtacttcgttggtactccctacttaccggatgattacacaggcttctactgcttacatgtcagatttctccctatgtatgaccccgctaaatacgtggcctatcacatccgcttactatttactgatctacatgtggagacatccatacttactatactaacaaccatcttgaactttttgtttatttgcaaatttgaaataatatcaacaaactggatcagaacatccctacacataagacacggtcgcgttcgaagatagaacagaggcaaatgatcaacgtagcactcaccaagatctgaatccgcagctttaaccgtgaccattgatgcgagtggcctggaacaatcttaacgggacgaggctcatcgttttcagtcccctcagactcatctcgcagcacaaacatattctgtccatggaacaaaccagaagcaacaaccttcttcaactgcttctggcgatattgctccatattgagtccatcacgaacagcaaaccaagtgtcccgggagccagtcgcaagcaattccctcagttcatcctggaaaggcgtataaagctcacgaagctcatcaggctcctcagccagaagctcagcaaagtcatccacaaactgcaagaactgcagggtaacaaccatatccaaaccagcctggaactcgcgcgtaatgaggccgtagtggtgcaggacgccgatttccagaatctcaatctgatgttccatagtatagcgaacaattgcgaggaaacggtctacgggaacgtcaatcacgagctccccttcaccctggttccagaccttccagagatcctcgtagttctcgatcggggcctcgggctcgaagaaataaccctgcaagcggtcggactgtaggtcgaagccgagtaccaacctggcgttgctgaattcgttctgcatgtcgggaacggggaggctcacgaagattactgttgggtttgtgtgggttgggagattgttaaggactggctcgtcatgtagggtgacttgtgtgaagccggtggtttctaggaggtagcactctttcttacgacggagtttgttgcggccactttcgatatgtaaaaggtagatgtagtagtcgaccacaccccatggatggtgcatgtagcggttcaaatgagatgcgaagcatacttcattgggggttgcaggcctgaagattgttgggctgatatccttgagttgggaatcgttggtgaatgggttagacttaggcctcatcaatttagagggaataatgtaggtcatctcatcggcgagctgagagagctgggggctctgcatggctgttataatttcaagccttgattgtcctggttgtcagactagtatctcctcggttgtaggatttgacgaatgagttgattcgagactcacgatggtcgggacaatctacaatgatggctgtgctcggcgagagcctttcacggaggacagaggcgatctccttgatagaatgatgaatagtgaagattaggcacaggagcaggacaaaactcttgagctccaggcgtgcagagaggatatgggagaagagctcggcgaagaactgcttgctgctttcctcgtatatgtagtaataaaggatgtcgaataggtagaaagcgacggctgcttcaaccacctgtatgatacagtgaacaagcacgaaagtcacagatccaaagcacagcacgaacccaaagcacaggagaaacaatatccactcggtatgtgtagaaaggtcctggaagaagttagtaaaggccataataggcgctcgcaatagggggcagcttacaatgtagagtactgtttatgtgcagtgtgttgaagtatgaagctatgggtggcgttgatagtcaattaacttgtgcttctgttaatttgctgtgttgagatggctgtatagaattctgtctcgattcgtagagaggaggtttccttttgtacactggatgaaaaggccgtggacaagtgatatgtgtctccaccgaaagaaaacaagagcacaaaggcatcctaaagatattcttctaaagccctcaaaggaaatctccttcgagatttgacaggagtagaagatacaaagagcataaaggcattcgccgacaaagttcttgtcgggagggttccttttgtcaagtactctatattatttgacttggtatcctaccagtaatgcccttgtttgttctttatcaccgagtatcaaagggaagagaagcccagggagttgtctttgtgaaacacgaatcaagtgtacaaagactcgatccaatatcataagagtagccgcggccggcctttcaatgtataaccggggataagataaagtaccccatatcagccagatcaacgtttaatcagctaggatagcattaggtcttttgtcgagaaatcaagagtgtcacgtagacatagactcggttcagggcctgtaaactcgatcaaagaagagacaaggccattctattctggaaataaagaggctttgttcctagccaagactgagtttcattgtgtattagatgttcgcaatatagataccttatcagtcttacatgccaggcatcacctagcaaatatttccttcaccgggaaccaccagaatctatgtcctcacaagcaaaggccaagtcccccaagtctcattcaatccagcaacccattccaccgaacatgggacaggacagtgtattccttgtgcggtctgattatttagagagttttgacgatgaaccctgggtcgacgtaggttctcagttcttggaggatccggacaacgaggaagctgactgggtcaccgtaattcttcccgaagaaatgaacaagacccatagcgacgaagatatcatgaagtatgtgctacataacatccgaattagacgagccgtcgtgagccaagtggcactgcataatatgggagtgacttgtatatcgatcccgatcccggtcagcactgctgatactgctacaatcttgatttgcgccgaggccgacggaaacaggtggctagaaatgatttctaatggaatggctacgcttcgcagagaggtgatttttgggcgtcggtgatctgtgggctgaatagagagaggttgactgattagctatattgtcgataccagggaggtagccaagtaggaactaaggattgttgtccggcagactctgagaattgtgtctagaatatcaaatcttgtccaaatggtcaaaggtgtcgaagggatcgcagtagctagacgagagttctagtaagtccatccaagtactgaatacctaagtaaccaaataaatcatatacaatcctcaagtaccaagtacctatatgtgccttccttttttgggttccttgttaccccagttccccactgaaaagtattctgattgcatttcattcatagctgtggccatggaataaaccgtaacaaccttggctttcttgctcctcaaagaaattctttgttcgtagttattttgggtaaataatagaatcatagctgtggctttgaaggtcatcatagtcgacagaggatttctccattaattctcttttttaatccaggtgtcctccatataaaaaggcctcggttctctcccgagtgattcgatttggacactattactttcaaccatatacaacaaacaattgttcaaagctcacactgaccaccgacaatatgccacgcgaatatgagccaaatccatttcaatatcactctaggagcagtatacaaggcaagtctctgtttaggtcagccacaacaggcaagttaatagacgactgtgaaagcaacgagacttcatgggtgactgtgagcctccccttcaggatgaattccacccataccgatgaaagactattagaatttgcgattcacgagatccggaggtaccgtgctattgtttaccaaataccgcagcatgcgattaggcatgagtgtatctcgttcgctgtagatatcaatgaggcaggggtgtccctggaacaggtgactcgtgcgtttatggctcaggctgaggttgtcgcgagatactggctgagggagctgcgtgccggtagggtcactcttgaccgagaccgtattttttgtgttgggctttttgatgcacattatgacagggaaacgcgcaactagtatagcattcgatggtctgtaaccaaagaccatgtttagattggaagtatgtactctcgatttcatggaattcaaaatgatattctttctcacatcagtatgacaccgaaattgttatttgaatattcatcagtcacagttgaaatttgtgtagtatcattgtatccctagccccgttagtatgcatgcgatgcgctgaaggagacatcgagggggggattcactacgagcggacccggttgacaggccgtatgttgcacagctgaagacagtagtcatacctgggatatagtagtggcctgtatgtcaattacatttgagtttggaaatgtttggttagaattagatggaggtttagatggttggtaaaactatatatagtacaatgactatgtctctatcaaagaccaaagtcatcggaagaatgaagaaagccattgtaacaatggaaggcctttgttaattctcatacgatactccagatagctcgcatctcaactgtaaccttataagccctcggtgtcctctatctcaccggcatcacccagaaaagcattatcctatcgccaacgaaaaagaacaagaagacctcatcaaggagacagtgagtcctcccagtctcactcaagcccgctaaccaccaagatgtcaagcaaattccagccaagcgtatacaagagcacgaatgggcaatatttcgccgagcccgccggtgaccgaagcgactactactggatcaccgtatatttctccgaaaacatcgatcaccgtgggattccagattcagaaattatgctgtatgtaagggatatgattgaaaagggccgcttcactatagacgatcagtcaatgcatggtctagggaaaaagtgtctctcgatccctatcaagcgcgatccggatacccctctgcctaagtcatggacggcggatcctacacatcccgatctccttcttgctcagaatcttgcagggtattggaaggatcagatcgcgtttaagaaggttactctggatcaacggatgatttttgttgagactcgtcgtaagatagtgagtatagaagatatgttagatgtgggagttactctgatggatccctggcgaatttaaagcgttctttgtctgtgttttcgtgttgaggtccagttcttttgatttggatgtttcagcaatcaatgcaatgcgttttcctgctttgtttatacttgtcacttgatagctgccagaaatggagaaagaagataaaataagatagatctttctttctaattgttactgaaagccattattatgaatgatataatctcttttcataaaggcgaataaaatacccgaagggacagcaagaacaagaccaaacaagagtatacagataacattatacattctgaaagaacagggaggcattataactatgaaaggatttcattctctcattgtacgctgccagaatagccggatcgtccctcagaatataaacctcggcgtcctcgcctggagtaccatcacagtgcatttccacaaaaagagccctcattcactccaatcgccacaatgccttttctacaagcgagtgtgttccagtcaagccagctcgagcatggccaccaattccacttcaaggacccccacaacagccaaccaggttggctctgggggactgtgactcttccggataccatgggccttggaaccagtgacaaggagattatagtacatatatgtgagaccatcgcagcaggcttggttacttggagcgatagtgcgatgcacggcttgggcaaatactgcatctcgtttccgatcaagttggaaacacccaagcaggacttgaaaaggctgatgattcaggttgagtacgcggcactgtggtgggtgagtttcatccgcgcggagactgtttctattgacaagcacatgcttttccgggcccgtcagccgcccccggatcgtgaggatcaacttttggatgtgcctttccattgggataagcctgactacacggctctgaatccgtggtctgtagtcactgtgctacggtagatcgtggggattgattggtgaagatgactggggtatctgattgggcttggtaggttgatatttcgaatggaacaatgagtgagaagatatagtaacccaagtgaatgagtagtaataatagaatttgccgcaataacgccagtatgatacaactggaacctacagataggttaccaggtctctattgatgagactttagatccaccgtgactgtctcgcccttctctcacgctctttcattttctgcatgagggtatatccacatccggcaccagtcatatacccacctagatgggcagcgtgatccatcttggtcagtcgggagaggggccaagcgcggaataagaacgcgggagctaccaagctgaagacctcggtgccgatcaggcaggtaaggaagacccagccgtatgcccagatctgttcttggagcccttgaggaagaatccacatggtgagtttgtcactaggaggggtcagtataggtactatatagaataacagccagataaatggcgggagacatacttgaagtggaacatgcaccatgcggcgacgataccgctggttgcggcactggctccaagggatgtcatacccaggcggccgaggatgacactgcgtgtcaatgaaaagacagatcccatgatacccgaagcgaaatagatggccaaaaagtttccgcggccgatttcatcgtggactgtagagcagaaaaagttagaatccatattttctagtgcttctccttgtcacaatgcatacctctggtccccataagtcccaggaccatcatattagttccaagatgtctccatgtctgatgactgaaagcgcttccaatcatgccaagtgagctaggatagaagggaacaatcacgaagtaacggttgagcagtttccacgcgggaggtacatatttccatagcaaagtgactgctaagttagctgccacaatggcacccacagtagccacagcaggaggcacatccggcatgaggcgatcctttcgtgctgggaactcatatctctgagcaaaagtatagcaaagagcaagaaccacgagcgagaacagaagcggagcgagtagacgctgagcctgccagttcaaatatggttaacaactaaacaactccacagagtgaaccatccttacattggtgatattcatcgattcagggctctcgttggtagcggcaatatgatgcttctggacccaagcgagatacggcctttcgataggatccgcacggggacgagctaaacatatcagcaccaatacctcacttagactcgaatcttcgtatacataccctcagtgagcgcagcttcctggtactgctgcaaggaaaggttcttcccaaactcccgcttcaaccgttcgtgttcttctttttcgccatcgagccactcctgccttttccgttcctgttcagccagcaagcgcttctcgttcctttcgcgagcctctttcaaaatactcttgccgtaaggagaaccctcctcgccaagctcggcgtcataagaaccgctttgcggcttatacaaacctagcttttcagcgcggcgcatgagtttctcttccgccgcacgatcctcacgttcaatacgggcaaagatagcagcatcctcgtcgacggggtactcatcgcggagccattccaaagcagtatcaaactgctgcttggtgatcgagcgggcaatgtcaactggcaagtccgcatcgagcgtgccagtcagacggtggccgtgtaggacagccaagatacggtttcccagctttgcattgaacttgacggggccaaatatggccttgatctcggcatcagagaagggcttttggcgggggagaacctccgagggatccgatttggccttgggcttgggagatgcggcggacgtacgtttgaagcggcggggggtagagaccaagttgagtcgttggggagatattggggttggagttggtcgggacgggcgagagaatagttgggacagaaggttcggaattggtagcatggattggcgcgatgtactgtacatgcgccatggggcaatgcggagatcgcgactggcaggccggaatgttactggcagcacggaggtgcggagccctgggcatggagcccgccatacggcccagaccacattgctcatatcctgtgactagagcgagggctcagagaggaccatggaatagagggtgatggtggattgttcggggttctttttggcggcatcaatggaccgcacggctgcagagttgttccgagaccgcgattacaacaggtatagagcgaaaagatggagaaatgatagtgagttcttgaatatgctttgttttttaagatattactagtgtgaactatagtatcagatgttctacctaggtatcccatccctaatgcaccactaactagtcaaaatcaatcttaactgacatccatctctgatctataaaacgcacgtgatgataacagataaatgataataaacggccctggagatcatgcatcatgcattgatttcatctctctttcaccactcaccaaagaaacttcaaatgtcgacccaatccctccctatcactccgggcgcctttgccgaagcaattaaagagcttcccctcgcagtcctctacagcaaagtctccgagatcacaaactccatcgcacacctgaagcgatctaatgctgagattcgtgcatacatagcagaaagcaacgattcagaggaagacaagaaggacctggagtgtcatgccactgaaaatgaggccgtgatggtgtccatgaatgagcggatcatgttactgaagaccgaggtcgagaatcgtggacagccttggattgagcttgatgagcttaagaccgacaaggaacaggacactctggcagatgtaccagtgacaaatgggaatgtgactgagactggagctggagctggagctggagctggagctgacggtgcaggagaggagtccaatgatgggggggatcaggatggggtccatctgtgactaattcggtgcgttagttatctgtgtagtcggcttctttaagctggtctggattttgctaatcttcaaaagcattgtcaccagtctgccagtggtactcggttctattatttgcgggcgctttactgcatttgcgtgtgggtcgaagatcggcttatggcaattggctatgtttcactaactagctagtagtgtccattcttcacagtgcatacgatgtgacgcctgaatcatggctaagagacggttatcccaagtacgtttccccaagccttcggaaccgtccgcgtcttctgtagccctatgcaatcgagtcaccaggtctagacaacatggaatacgtctagtgaattgttcacaaccccaagtgtcattatggaattatgatcagatgactttattgcaatgaaaatattaaaaacaagcaatgaccaactgatgctgaatgaagatatgcaagatcatcaagtagaataattcacagcgcatgctaaatcaaagccccggctatgtcatatcattgcaaattcgcccatttttttaaatggcaggagaaagcagaatactaacaaggtaatacagcgcggtccaacgccaggttagcggacatgtcatggtcgtcaaagtaaaaacaaaaaggtgcaactccagaccggtggagcttaagtagcggcctgctgggcccagtggccaccggtgagcgcctctgggggaacccgctgctgcttgatgaacagctcaattaagggctgcataggctccatctccttatcggacacaagcccatagtacttggagacagtcacgaagtgaacgaagcacatgttcaggacatcgtgcttgttaatgtgccaaaaggggttaagccaatgagcgtggtacaaatgggcgtagcagcggaacatctgcttcatgataccctggcagtccttgtaaaaggtttgtgggaagccactggacttgccgatccaatcatctgggttggcggggtcggagggagttgttgatgcgccattggcctctttaatggaagatgtttcaggaatgccatttactttttcggtagggaacataacaggatcatggatcttgctgacgatccatttctcgacgcggttgatgaacttcggcgcggaaattttggcggcgcggccatcaacaagccaggtgtaggtcagcctttgaaatcgtcagccccgtttgaaatttaccccgctatacttcacataccgtccagcggacattgttggacaagtgttctcattgcaaataggtagaccggtcacaccattcacctcctggataacctggagcatgccgtgaagtagacgatattgttcaacaactagagtagagacatattagcatccccgcttccacgttgagcttccatattgcttactctggtgagccagccactcgcccagctccacattcttcgggcaagcacagagggtcaagaagttgcccctcacattcagcggggcatacttctcctggaagaagtatttgggtccctcagggtcgttggcttgagtctccactgacagactactggaaagcgagggcgaatttgacatggtggcttgatgctggggagcagaggcctgtgctgggcttttggggggattgttgctcttgttgcttcctcctcggccaaatccttggcgactgtattcaaagatagagttagcgggcgatcgtggcgaggtacggcagtttgagaatgaagtgggaatatataagaggaagtgtagatgtgaatgacaggagaaggcgccagggaagatattagactttagggaatagaatgctcctttgtatttgtggcgcgccgggggtttcttcgtgcagtatgagggggtaaaggtagcagggagattgaacaacctattgcaacaagtccacgacagcacagcattacttacacgctctggaagaaggtcgccatcttgaaattgatctgcaatgcttcaaatcaagaaaataacaggggatgagggacgagacggtgagatgtccacacgttgaggatccccttttggtctgggccatctagacactagtcctgtttgggtccggggtcggaaaatatatagccccgtgcgtcaattgaattatgagagctccgtcgtaacgatagaacaattgtcaatacaggttgcttactgccagtataatattcaggagtgtcactagtcccttctttaccgtcactcacacttccacacatttatgactttgcaacaacgatagtttccatacaccatgtcctcctccgacgaggccgtccgacgccctagcaatggcaataagagccctgcgcacagcaatgccaatgattctggcgccgaccagatggatgaaggcgatgatctctttggatcggacggagagggtgaactcgatgacattgagtatgcgaaccacaccaaagcgaccagcgctagatactgatatattaccagaccccaccgcaacctggacgacgaacaacttgactccggtgatgatgagaatcgctatgatcggcgcgaagatccaatggaagatgtggcggaggagcagcaggaagtcaatgttgctgaccaggaccttgctcgggctccagtgccgttgaccaacgatggagaggtaggacgagctctaccttgaagctttgatattgatctaacttctggtaacagatctacacaatgcgtgtgccggatttcctctcaattgagggcgaagaattcaaccccgagacttacgtcccaccgccttatcagaccgctgctacctccctatgctggcgtaaagatcctgcggatgagtctcttttacaatccaatgcccgcatcattaaatgggaggatggctccattactcttcaactcgcctccgccccccttgagcaataccgcattgcatctaaacccctcgcacctctcactaaatccggcgactatgaccacaagctggattcccacgtttatctcgcagctggactagaaacagctcaagtcttccgattgacttcacatatcacccaaggtctgactattctcccgaccactttggagacggacgatgccgttcagcgactgcaagaacagttggccgctgctgctcgtggtagcaaacagaccgcagctggcactgcgccgcgctatgaaataacagaggatcccgagttggctggcagacgtgccgaaatgatggaaaaggaagctatcaaggccgagcgtcgtcgccagcagcttgctgatcgtgaggccgaccgcggtcgccgccatggcgctactcgtactggtcctagcggtcttagcgtcggtggtcttgaagatggcggcttgcttacgactcgtccacgtgccaagcctcgccgccaaaaccgccgcggcgagatttacactgatgacgaagaggattaccctcgtggtgctcgtaacaaagaagacgagtacgacgaggacgatggattcttggttggcagcgacgaggagcttgaggaagaagccgaagatgaagaagaggagctggaggatgaagacatggatgccgaaggtgaagatgacgtggagactgcacctgccaaagctgcccgtagcaagccagagcctcaaaccagggctggtacgcctcctgcccgaaagaagaaccgctacgttgtggatgacgaggacgacgagtgagtctgtagcgttctatttttctcctatactcttttcttttcgcgctttcgatgcagttttcttgttacatatccacatggtccggcgtcttctacatggacaggcattcgagggacaatggggctcatttcactctgatttgatgcctgtacaacaaaaattaatgaaatggtcaatgacatatcaagttagcttcgtaccagcgaagcaacgtagatttgtatcatctgatgccgaatggtatatacatatgaaataataactccacataatctcggacatattcgaagtgctctaattagccagatatttcatgcattatgagcccccgtgtgcgctttgttcctcgcagtgacaggctcaacgccctcgggatattctgaaggatcaaagttgaattttttgatcacatccctggcacttccaaccacacgaagacataaaaactccttttcactagaatcctcttgatcttgtgactgagccggctctggtatagacattgagttccactgtcggcttggatgttgcccaggctcatgccagcggcgttgccgattttcgatttccataatcatagacagcagatctggctgctgagaacagacaataatggcacctggctcaacgggaccaccaatgacagcgcgacgaacaacttggtggagccacgatttccaaacttgtgctgggtcagggctttggagtacctcagacacgtactgtggaggcgcggactgcatccccagttcaacagggtcggtttgcgcaacgcgaagccatgagtccgcgacaacggttaatagagttcctataaacatgatattttggaggcccgttgagaagatcttgggacaaacttgacagcggatcacgttccgtgctgttcgtgcagcaatatatagcgagcataaagtgtgggagttgactgggaaggaggaaatggatgtcatgtggctaagggataggtagaggtatgataaacacggacacccagacgctgtggagtcggaggaaactgaggtggcaggagatagcggcgtggaagggaaagctggagggttggggaatggcattggcatggccgtggcttcggagatggccgagaaatcaggccaaggagaagatgatgcgggaacaggaaggtttgactgttttggacggtctggcctacacatatggttgtggtcttcataacctgacaatagatttgcggactggcactgtggcaaattcatgttcgtaccaggccgccagaataactgcggacaaagatgatcggtgtctgggaaggagactgtgtttggactcatccctaatgaagattgttgcaagtcctctgggctgggccaaatttcagttccagatagccctgggaattcgaccccctcatcgtctgttctcgtccttttcttgggtggccggcccatctgtttttgtatggaatagttgcacgagagtgactgtttgatgcatcgcgaacagcctgctggttctccggagcatttgagcttccgttttcctgtcgaacagtaaactggtcagtgagggttatattacatcggcctgtgagacttactacactcgtcgcatgctgcatgtctttttggttctgacaaatcattcggggtaggcaaagaagcctctccctcatactcagtcgggagtgacatcttaaaaaatcgaagatcaacagagcccttcaataaaacattctaatgttgggctaggtcatagatagactcgataagatgggggcggtcatgtgggcggtgagcggcgaggcccgagaaattatcctaaaaaaaaaactatggatctaccgcaacaagacaacacccgctgaacggcatcatgaaccccaaggcggcttcaaaaaagcgcaaggctgtcactcgagatgtcgaggaggaagccggtgtcttttccggtgacgaattgagcaaaggaaacctcgatggagccttgtcggacaactctaaggatctttcggacaacgaagacgacgacagcgactcggaggtcgaacttgtcgacgatttcagcgagtcagaagatggagaagaggaattggacagtgatgagatcccctctgatacagaggacatcaagccagctgctggtgaacccaacttccgcattgtgaaggacgccaacggaaacgatcgttacctctgggatgaaattcacccggacgacaattctgaactctccgaggtggatgaaaatgctaacaccattggcgacattccactgaagttctacgacgaatatcctcacattggttatgacatcaatggaaagaagattatgcgtcctgctaagggggaggccttggatgcgttgttggacagcattgaaatccctaagggctggactggcttgactgaccctaaaaccggcaagcctttgcagctcagccaagaggaattagagttgcttcgcaaggtgcagatgaacgaggttccctccgagggctacgacccatatgagcctttggtggaatggttcaccagcgaacaggagatcatgccactgagcgccgccccggagcctaagcgccgtttcgtaccatccaagcacgagcagaagcgtgtgatgaagctagtgaaggccattcgcgagggccgcattcttccttacaaggcaccagaggatagggaagacaaggaagaggaactcatcaactacgacctgtgggctgatgaagttgagcgacctgaccacgtcatgcacatcccggcgcccaaactccctccccctggttacgaggagagttaccacccgcctgctgagtacctgcccgataacaaggaacgcaaggaatgggagcagacagatcccgaggatcgcgagaaggatttccttcccaaggactttggctccctgcgcagagttcctggatacgacaacttcgtccaggagaagtttgagcgttgcttggatctttaccttgctccacgtgtgcgccgtagcaagctgaacatcgaccccgagagtctcttgcccaagctccccagcccggaggaactcaagcctttccccactgcttgtgccacagtctaccgcggccacaagggccgtgtgcgctctgtcaacgtcgacccaactggtatctggctggccactggtggcgacgacggtactgtccgtgtctgggagctcctgacaggtcgccagttgtggagcgtgaagctcagcgacgatgaggcgatcagcacggtccgctggcgtccgggcaaggacgccgttgtcctcgccgccactgcaggagacgatatcttcctcgccgtgcctccgatcgtcaaccccgaaatcgaaaaggccagtctggatctcctcgacgcaggctggggtttcgccgcttcccgaccggcccctagtgcctcagaggagggcaagaagaacacgcccccgacctggatccgtccctcgtccgctctcgtggatgctggtgtgtgtgtcgtaatccccctccgctacgtgcccaagacgatctcctggcaccgccgcggcgactactttgtgacagtctgctcgggcgcctcgacacccgcctctgtcgcaatctccattcacaccctcagcaagcacttgacacaattccccttccgacgccgcctaaagggtggtggtccccctcagaccgcccacttccacccgtcgaaaccgatcctgttcgtcgccaaccagcgctcgatccgcgcttacgatctctcgcgccagctcctcgtcaagatcctgcagcccggtgcacgctggatctcgtcattcgatatccacccgacctcttcgagtgcatccggcggcgacaacatcattatcggctcatacgatcgtcgtctgctttggcacgatctcgacctctctcagcggccctacaagaccctgcgctaccaccgcaaggctatccgtgccgtcaagttcagcagccgctacccactcttcgcagatgcttccgatgatggatccctgcagatcttccacggcagcgttactggagatatgctcagcaatgctactattgtgccgctcaaggttctcaagggtcacaaaattactggcgagctgggtgtcttggatatcgactggcacccgcgcgaggcgtggattgtcagtgctggtgccgatggaacgtgtcgcttgtggatgtaatcttgagatgccgttgcatgatgtctgacatttttctgggcgtttttctctatttattttttttgtgcataatcttccttttgtatagttatcttacaaaaaagttggtcctataaaaatttctacttagtatcatatcagaacagttaggataatccatcgtggctcagtagcggaagggatatagaattaatgatcatgttcagtcaaatagcaaatgttcaaggtatcttatgtccacaatcccaaggaagaaaaaatgggagaaaaaaagaaaaactctctagatctaaatatgtaaagatgtatatcccaagagaagtacatatacaaatcagcctcaaactcaaaccacaccaccactccaatccctcctgagcttctcatacttcctcaagtccgtaacactaggccgaacaaatgacttagcagcaacaaagtcaacgaacttgatactatcgcgacgcttgatagcagagtaaccagcacgacgcaacaaactgcccaaatcagcaccactgaagccctcacactcctcggcgagtttgcgcagatcctcactaaactcaatagacactttccggagaagagtctgcaagatctcgacacgctcgagtggcgtgggcaggttcacaaagagaagggtctcaagacgacccggacgcagcatagcaggatcaataatatcaggccgattagtcgcagcgatgacgtagataccctggcgactactgccgaggccatcaagctccgtgaggagtgtgttgacaacacgggcggaggcctcagagagcgtatcatcacggcgaggtacgagggcgtcgagctcatcgaagaaaataacacagggcactgaggagcgggcgcggacaaagacctggcgaacagcgcgctcagactcaccgacgaacttgttgagcagttcggggcccttgacactgatgaagttcgcgcgggattcattggcgacagcctttgcgaggagcgttttaccacaaccgggtggtccccagaggaggacgcccgtcggcgcggtgatgccgactttggcgtagatatcggggtttttgattggctcgactatggcggtgacaagctcttcgcggatgccgccaagggcaccgatgtcggcccaagttgtatcggggattgtggcgaagccctcgcgcttagaggagggttggatcttggggagggctgtgaagaagtccgcgttggagacgaggacgacttctgtttcatcgccgatgggggtttctttagcgtggataataaggcggcgaagttcgcggactcgcgggctgatatcgtcttcgccttcgatttccatctccatttcttcgccgctgttcgacttgaggatctggagataccgcttgatggcggctgagccggcggtcgagacgagatcgttgagatcggcgcccacgaagccgggggtgcgtttagctagcgtcttgaggtcgatatcgtctgccaaacgcattttgcgggtgagtgcgcgtaggatctgttctctgactggctctgagggcacggtcatgttgatttccttgtcgaaacgaccaccacgacgcagagcggcgtcgaggctgtctgggcggttggttgccgcgagtacgataacgggttttccatctgtcttgtcgagggcaatatcgtccatgcaggtcagtagctgcgcgacgattcgcttttccatctccctctgagcgctctcgcgcttcggcgtaatcgcatcgatctcgtcgatgaaaatgagacaaggagcaagacgcttggcctcttcaaagtactcgcgcagggctttctcggactctcccgacattcctgatacaaccgaaggcgcagagattgagatgaagggcacacccagttccgctgcgaaagcgttcgcaatcaacgtcttaccgcaacctggcggaccatgtagcaatactccgcgcgggggctgcacgtttgatgatagatagacctgcggccgggtcatgggtagaataatcaagtccccaagttcctgaacaacatcatccaatccacccaaatcggcgagactgacatgtgttggtggcgaacgatctgcgggctcagctttgcgtcgcttggacacagattctccgccatgcgttcttctcttggaggagctgggtgccggggtgctagcggcttcggtctttttggccttcgttgttgcccacgagccgacgacgctttggttcattccattgggttcctgatatagcaattccaatcagattttccgtctgattcgagtaaaatatgcgcggtgcatcacttaccgtagcagcaggctcctcgagtccctcaaagtccccctccacggaatcctcatcatcttcacccatatcagctttgataacctccaagactcgctcaagactgtcctcaatgagtctcttcggtttgcgattcaagcttgagtttgatttcttaattgtgtcataaatcgctgggaccgatagtcggatgcgcccagtctcggactggtcgtcgataatcttgcgcacgatctggtagacctgtttttttttttgggtgagtcaaagccacaaagattcattgtatacacacctcacggtccaggccctgactgagggtcggcctgcctcccttcctagcagccatgattcgatatggttgttatgcaaaaaaaaaggccgcgggcccgaaatttcggagattggaattttgaaagatcggttgaaaattacacgtaattacgcgcccgttacataacgtcattcatgtctaggcccgcatctactccgtacatatgggggttctcccttctcttcatcaacatgggaaactcgagtagttcgcagaagatatctgcccaggatcggtgagtgcaacctgctttactttatacatacaatatcaacaacctattctcaatcccgcctcccagggcgttctattattgccctcacgagacccctcatccccacccagcatgcccattcagggaacgcaatagtatgattttagctaaccaaacactccgcggtaactgtagggcaattctcgacctcaagaatcaacgcgacagactgcaacaatatcagcgacgaataaccgtcctcacagaccgcgaaacggaaatcgccaaggaatgtctcgcgcgcaatgatcggcggcgagcactactcgcccttcgccgcaagaaataccaggagtcgctccttgcgaagacagatggtcaactcgcgcagctggagcagttaactgggcaggtggagtttgcgctagtacagaaggacgtgttgttcggattgcaacaggggacgaaggtgctgcagactatcaacaaggagatgggtggcattgaaggtgttgagagattgatgggggagactgaggaggcgagagcttatcaggaggtatgtgcctcgttgtctcttgttcttgttcggttttgctgacggttgtcataggaggtgagtcagatgctggcgggtcatttgacgaatcaagatgaggatgaggtcgaggatgagctggaggctctgcagcgggaactttctggtcctgaaatcctgcctgatgatgtcgtactgccgagtccgcctactgctgatctgcccgttgaagagccagtgccagagtcgactcagagaagcaaggctaaggctgagactcggacagctttgcctgcttagtggggagatatgttggatactcgttgcacagcatcaagcattgcattaaattgatccatagcattttttttggcgtttcagcttctttgtttttgttgcctacattgctggtagagttcatgtgttctaaggcgttactggttggctttattgctcgttgtcatactcgtggtctatatattatgacaccatcagtccgaggtttacaaatgatactcaatatatgaacccaattcactggaatgagaatcacataacatcaatgaaatctatgtagaagtacatagtagtagaatggtattgtcgttaatcatgacggacccaagacacaccaggtcatacttccccctcgaacgaagcctatctattgcccaggcataatactgccaccgacaccactaacaccaggaatagagacatgatcctgggggttcgccgcagcctcataaaggaaattaatcggctcccgggttaacttcatgaactgccccttgaagcctacatacccaaccttagtcacatcctcctcgccatcactccaattatcctcaaagaagagcgtaacaaaggtagtcgcattccaatgagcgcggttcaagggtaattcaaagacatcggtgccgggtacaggctgcgggacctcaattgtttgagtcgggtgcaactccgatgcggttgagaaatccatatcgtcgcggttcttgaacagctttattgtctttggggcggagcttgtaggcgctgtgtacaaaaggagggagtggacgttgacctggccgttgaagctatgttatagaagctcggattagtttggggttggcgataacggtgaggggtcaaattagtgggggtgtgtttaggattttcgtgacgcgtcgcaaggggttgaacaaccactataaaatgtaggatagatgtgtgaaatgagcgagactcacgggatggtcatgagcagttgttcgtcggcatcactttcgagctcgggcttgtcgtttagtcgctcggcccaagttttctggacgatggctgtaccagagtttggggttgtctctgtcaagatttaaaaaatcgtcagcaatagttgcctggtgatcacaatggtcatgagtaccattcagggttgtgatcaggtcgaagttgatctgggagtaaaggagggattggatggctggagtgatatcgttggtatggtcgtgatcttcaccgtggcagtggccatcgtggtcatgatggtgccctgacattgcaagatattggtatagatttgatgttgtacaagatgtggataaggcaaagatggatttggatatttgaaggtgaaatgttttggaagctctccactcccgtgacgtcgttttatcccgagggatcacattgttcgaagtgaattgatatttctatgtattaatttacaatgaggtagtatatctgaatatctcactgtacagtacaatggcacaaattgcctctgtcgcttttactgccttggtttccgtcgatctataaaatgcaaccaacacactatatctcaattccacagccccctcaaacgcctgggtattattgtacatgtccctcctctctagctgaattcaaggtgctgttattgcctgactcggtaataatccggagcatactctagcaggtaactcttctcgatcttagtgacatcgcggatgtaagttttgtcacccgtttgcatgatttcgtggaatatgacccagtcggcttttcggttctatattcactttagtaaacccaacatgtactttcccacatgatctatgggtactcacaaacatcaacgaggtggggtgagcatgaagagtcagaccaccgctgacagtcttaaaggttccatctggttgcatcttcgccgcgtgagcaaagtagccagtcgtaagacaccgccgaatctgctccggctgcttgctcaaatcggctgtgccttgacgggatgaaagtgtctcatcgacttgaatgccaaagcgttctaggtaccgtttcaactggcctcggatgctcactgcgcgaagcagtgcccggtaattcaggaggttgtcgcgacaccattttgagtccttcttccctttggtgacaaaggcttggtacacgttgaggtacgtcaaatgatcgccctcttcaacggcgaactttcgccggtgactctcggcagatcttttgtctccagcatgttgaacccacacggtcccctgtaggttgaccatggccgcaattgtaaggatttcacttaaacaattgaaagatggtgcggtgagaagaactttggccatcataggatccagggcaatttctgccatccgtactccaagaggtttcgtgagtttggcatagtcgtcaatcgcaccgagagaggacaagagctcaagtgcacgaataataagttctgccggcggaggggtcaaaaagtcgaaccggacaatattgtcaatgcccagtgctttaagctgcataatgaccggtgcgagatttgatcgctgaatttcaggtacggttgcctccggcatctgctcaaacgcttgttgcgtgtacagacggaaacatttccctggtttcgttcttccagcgcggccagctcgttgggtggcggatgctttggatattggcactgcagtcagtgtatcaataccagtattggggttgtatgccctgagtttggcaaagccagaatcaatcacatatacaatcccatcgattgtgaccgaggcctcggcaatgttggtggagacaatgacttttcgggtgttttctggagtcggctcgaagacgtacatttgctgttccgttgtaagtccagcatagagtggcagtggaagcagagatggggccttaggatggagagtcgccgctctttcggatatcaactgaattgctgtgtcgatctcttcccggccagtcaaaaagagaagtacatcgccttctggttcttgggtatggatatcaaagacggtcttgactgctcgttctatgtaatcttctgccggagactcaaggaacagcatatcaactggatacattcgtccttccagactgatgatccgaccaatgcttccacccaaatccgccggttctgcctcgggccggtactcgtcgcccgcgaagaaacgaagaaagtcctctgcttggagggttgcactactaacaataatgcgaagttcagggcgcttcttgcggatcttcttcagagttccaagcagcacatcggtactgagagatctttcatgtgcctcatcaaccatgattactgaataccgcgaaagcaggggatcaaccagggcttctctgagaagcatcccatctgtcaagaatttgattcttgttgcaggagatgtcaaatcttcaaatcggatggagtagcccacctcttcgccgactttgcatcgcatctcttcggctacccgcgttgcaactgttgtagcagccacccgtcggggctagaacagagttagtcggtacttattccaaatatgatttgatcagtgctcacctgtgtaacagcaatgatcttcccatcctcacaccatcctgcttggtctaaatattgcggaagctgagttgttttcccactacctgtttggcccaccacaatagtgacggggtatttctcaaccaggtagagcaggttctttttgtgacgtgcgataggtaataaagcagccggtttatacagagctggaatgaaagaggtcgagagctcctgttctgaagccattttagaccgaattttagctgagaacgaactcttctggatttgagcccggttgttaaaagaaaccgaattgggactgggccattctgaggtgtcaagcgctttgcagattggcaacttggagatcgtcggagttctcgcagaaacatccagggcgatctgtataaagcagcccgctatcacgtgcgccccacgtcacttgaagcttccccgatatgttctgctctcagacattctcaggcaacacagtttttgtgaatttcccttcagtcactttcaatactctggcaggtcctgaatatacctcaagatgtcagaggaggaaaagatggtatgtttcaaccgggtatcatttcttatcgcatgaggctcacgttcatacccagaacacttccagcagaccctcagctgcccttggttcctctaacagcccccgagccgagtcaccgaccaccgcgcgcccgatggactttgacgacgagccccaggagaacgggattattacgtccgaccctatcgctactcagccagctgccgccgaggcagccccgccaaagccgccccggcccctgaacccgagagaacagtcggagaacacccttagggaggcatttccaagcatagagcctggcgtcattaaagcggtcctgaccgcaagcaattggaatgtcgagccggcgttcaatgccctcctgggttcgtggggaatctactaagaaatgagtatgagctgaccacgacctcggcttgcaggtatgaccgaccccaaggctcaagaagagatggcacccccgccaaagccgccgcgcccaagccaacagagcactgctgcacagcgacaactggaagccgatgagatgtatgcacgtcaactatctgagcattacaatgcggcaggacgtcgcgcaccacccccgggctgggagagtgatccccgataccagcgacctagaggaagcgaggagtcagaggagagagaatacagcttttttgatggtacgggctatagtggcttgccgaatgggctcgtgctaactggacgtttacagatgatctacctgtgattcgcgagaacctccgcaagggcttcctggagacgcagagtaaggttaactcgtgggtaacaaacctgaagaagcgtattgatggagaggacctggatgaggagcctagccataatcaaagagagactcctgttcatgcccggccccgacgtagtggtgatatgggccgtcgcagtggagatcgtgagcgttacgacgcggaccccaaggttctcggggatgatttctctgctcttgagttaagggatggagaaggtagataacgatctcaagtgtggcatcattgggtcttgctaactgtgcacagctcccccacctcgcccccctcgtccgggccgccccaactctaaaccatccgcatctccttctccagataggcgtaaggtgtctttccaggatggaccgcccgtcgagatcgacaacctttacgatgcttccacgccatccaagcgtctcagctcaacaggcaacaaggcgagcaaatggcagccactgtccaccgttgagccttctcccgtcgcggaaaatgacccattcagccttggcgacagcgatgacgagaaggaaactaagatcaaggagcataccacgggctcggagggcgatcagcccaagcacgtcactgtcgagtcagtctccgacgaagtgggttccacggaccaggagaccaagggcgcgagcaagcccgacgagtcaaaataatcgcgaatgtctggaatttgaatatccccactgttatctgcgcgaagcacttcttgcctttcctcccagcccgtgaccatatttatttcccctgtcgttttactctgccaacttgctctgctatgcgctacccacctccctgattttacgatacctagtagaggtagcccaagacgtttttcaaccttcgaatacctgcataaacccaagccaaattgaatctgtatttgtaccggaaagaaacaaaacaaaagggtatatctccgactggcccgtatagtagcctcaacgccaaaaccaaaacaaaccaacaggcctcgttcaattcactgataggcatcaggcaactcccgaggtctcttacacccacgccgactccccaaaactattactccatggcgggagcattacccacgcgctttgaacctgtctccttgcgcagatccttgatgacagtctgtaaagtagagtcagctgaaagatacctccaaaagccgagtaatgcgcgtagagtgctgttattggtctcgggggaaacgcgtaccgccaaagcatcggggttgaccccgttctcaatgagagacacacaaagtgacagctctgtccggtccaggttggtattctattcaaaatatcagttttatggttacagctttatcttctttttgtaaagaagagagaatgacgacatggattaggcagtcttgaattctgaatcctctctagtttagtccgggataagcacgcaccagcaagtcggagatctcctgaagaatatcgatgacttctctggcagcttggcgcttgtcatcagcctgatcttgagtttttggcggcatattttgttttgaaattgaaggtgggggttgttgaagtgtaaggcggttgaatctgtgtggttggagttgagttgattgtgtgggactctgctgcgggtcaaggcaaatcatcggcgcatacggagtatattgcatggagtactccatacattaacgtgatatttgatattttgataattatctgtattctctaggatacaacattttagttaatctcttaaaatctatgagatattgcgaacactaatattagtagggcattctctattcaattgtcaatagatggcaatctgtacactctcaatcctcgcgataaatgcattgtccatagatgggagaattggactatacgcggccaccttgataactaccactaagatctagtgatcttcccattcgcaccgaaccctaatcacaaccatccccgcccttcttactacccgtagacgttaggactcgggtgagacagaaacagatccaatagggagattgaagaaaatctgatattatggctatttatgtcaaacgaactgtgcaatagagtacctattaggctgatccggctaatcctagggccagtgaatacttttgttgtttttcggcatccggaagttaatgaatacctacatgtatgtaggtttacacccttgtaggggacttttgtttgctatgggttgtgtatagggtttaccatatgtaggtagtagacattctttcacatccttttcgtttccctgtttctctgtatgccttttacatacatttttcttatatttacataatttgagactactttgccttactgtgacagcctaactccatgcaatgggccattatgaagatatatttgatccctaaatagcgttaccctacagaaatgtcctggcatcgccaatatgcctctcgtgagcatgtagctaatgtaggtttgttttgggcatgtctctaggaagaggtgattggagatatcttgacaacattgagatcaacttttaaaactgtatcaaagtaatagattgaatggaggtcaggacggagagctgcatggtcgagaggttgaggtatacatgtgaagcgttacatcctaggacctaagctgagcacacggcaaaccccctagaaggtcatacttcgcctacagtagctgttctttcactagagagaggatttatataacaagcttggaacattctaagaactaggtcatgaaaaacgaggatagagcctcaggccctcgtactacatatgtactatgtagcttgtatgttgtaagcttcaagagaaagctgcatataaataaccattcaatagaagataagatgaaccaaaggtaaatacaaatatcatcaggtgattctatcttcggttttgtatctggagatagctgatatagaaacgtggaccgggaaaaaaaggaaatgcgacaacattggtacgaggcgaacggcgatgcgtactaaatggttaaggtaaatgcgttcagagaacgatgtaatcaaccaaattaaaagtcaagctgtacacaccgtacttcagctcttctcttactcacatttcccacgaacccatctgcagccagccctatcgggttgaggccaaacatcatgcctttcagcgtgactgcattcaatagggacacgggattcgtcatcgtaccatcgacagacccaacagcctggcaacaattccgacaccgaccctgtcttttcctcgcccgcaagctctctgcctggcgaccagccaaccgccccgacctgcctgaaaaacctatcactgtagtctgtattgcaaacgcccacagacagcgaccagtgataccgcatggtgacattctgatctatgctggtgggttggcagcagatggatcgctcaccgaactccaagccacgctggactggctacgatctcagcctcactacactaaaatcgttgtggcgggcagatctgaccggtatcttaacgtattcaagaaggggggtgaccgctggagatatggatatcacaatgcggcacaatggagcgacatcatctatctggaacacgagcatgtcacagtgactgctcagaatggacgccaactccagatttttggaagcccatactcaccaaagactgttccgttcccggccttccagtaccctgagactgataatatttgggaccaaatccctggcagcgtggacattctcatcactcacacaccaccatacacgcaccgcgactctctccaaggatgctggcatttgttggagcggctttggagggatcctccccgactgcatgtttttggctgttctcttgagaattatggctctgaacttttgcattatgatgctcttcaggaggccatggagcgcattgaggctgccggtgggggctttgtcaatcttctgaaggtgctcaaagcgcttgtacagtcctttttccgtcctagcatcaaagctaagactgcgctcgtgaacgcatgcattgaagggggattgtggcatcccggacgccaaccaatcacggttgttatttgacttgggctggaaattggttgcctatgcgcctaggcactttgcgaggatgaggtgactcgatgcgtgatttaccaatgaatgaaccacctgctttaactgtacatgcctagacgcgtagatgaaattgagatattgtcgactcgtagttgtttatagaccaaggggattctcattggtcgaaactcaccggtggggaccacgacacttttcactacactcgatgtttgaactaacttcctacttttacacggcataaactgtcacagttacagtgtcaaatatctggaacaggcgtgctaaaactagtcagccgtggtctggaatggcacctcgatgcgaaacgggaggaatgtccggcctcaccatctcggacattcattccttaaagaggaacgaggcactggagattcttgcccaaatttcacgcgtcgagaaaaggaccttccccaccaatgaggcattttcattcggcgaggatttgtggagaaagaagcctaacacgcgagttctgtacgcgattcgagccaagggattgcaatctgatctaattgcctatgcggtctatgtccgacagaagggcgttgcgctcttgcacaaagtctgtgtgacagagcctaaccgccgtcaaggtgtcggccaggaggtgctgtcctacattcagcagcgcctacgaaaggagggctgccagtatattcaactctgggtggaccaggccagggagcctgcacgcgccttgtatctccgaattggattcgaggagcgtgaggtcatccctgattactatgcccctggacgaacaggtatcaaaatggtcctggacttagaagcgtgatggttgagccactgccgtcaatgctgcactccacgggcctttttccccccactaaaaatgtgccttgccttatcggtccctttgtaatacatcctagggacaataagtcatggtggttggacgcgtctatgctccttggctgctgcaggagccacctatcgctaccccttgcatagacacgggcatcttcgaaacgtgagattatagcgatcgggcctgtgtccattctccgctatcattctgctacatacctccgtgatatctaacatatccaggtatggcttttttcaaagggcacgccttgaatgtctccctggtccctttggtgcgagagggaccgcgatccttttctggaagatcatgcgtgatactcattcatcttcgtcctgaatctctttctttcaatcttgactactttcactatctttcgccgtgagactgggagcatcattggtgattggcgagctagctgtgtactttccagctatatacagttccagtgtgctcgcgttctctcaatcgaccatggcgttctttctcaccatcgtgctggctttcctgtccgtcgccagtgcagcatcactgtctgccaattatcctatcaacgcgcaattgccacctgttgcccgagtttcacagcctttccgatttgaattcgcccaaagtactttctccaacagtgacgcggacactaaatactctctattaaacgcaccatcatggcttgaagtggacagcaccagtctcaccctatccggtacaccgcactcaggcgacagtggcgcgatcactttcaagcttgtggcatcgaatggatcggaaaaagacagcatggacgttactctaatcgtgacagcagaccagggaccgacggtgaacaaaccgcttgtacctcagctgcagaagttgggaccggtctcataccctgccacgctgttcattcaccccggtattccattctcgattgagttcgatccggataccttcaacaacacgcatccctccacgatctactacgggacatcgccaaacaacgccccgctaccttcctgggtcaactttgacccggcagccctgaaatttgttggaaatagccctgcttttccaggcgcggggcctcaaacgtttaccttccagctgatcgcatcagatgtaactggatacagtgcggccaagatgacttttgaactatcgatcggtccccatattctgacattcaacgagactgtccagacttttaaccttacgaggggagaggagttcaacagtcctaatttcactagtcttctctctatggatggttcgccaacttctatcaaaaagctggcaaaagtcgatgctgaactgccgaattggttgaaactggataaggacaatatatcgctgagcgggacgccaccgaataatgctgtgaaccagaatattactattgccgttacagactcttttcaggatcaagcgcagttgatggttcgcctggaattcctcaagctgttcctcgatactgtcgatggctgcgaggccgcgattggccaggagttcaagtttgtgttcaaccagtctattgtcactgatgactctgtacaattggaggtcgatttggacaacgatctcacatggcttacttacttctcggacaacaagactctttacggacacgttccggatgacatggatcctaagaagtataccatccctcttactgcatatcaaggatcgaccaaagacacaatggacttcattctcgatgtgctgagagcctcggacacacactcgaatcccacagatccgtttaccaattctaacagccctaaccacaagaaggctggcatcatagccatctcagttgtggttccattcgtggtgattctgagtctgctgattctcttctgctgctggcgtagtcgcaagagctcagccacggtcgaagaaggtccgtccgacagcaagattcctccgccacgacctgttaggccagatgttcctaattgtcagccatccatggcggaaagaccttctcgtgatgacaattccgaagattggatgagtcctatctccccatcgtcgattcccaagctcgaacttgggcccgcgtggaacgtgtcatcatttgataaacgggagcacccagttaactttactatccctgagcccgttgttccccctcgctctcctgctcgcaactctcccactcgcaactctcccattcgcgggggctttgtcccactacgagaccccatcacccaagaggacaacccagtccaaactgtctcaccttccaggaagcaaaacaatcgcctctcatacaccaacagccccgtgcgtcgtagaaccaccaaccggtcccgacgagagccattgaagccgatccaagcgcgagccgtgaagcgagaatctctccaatcatccaagtccaagagatactcaaagcgctcaagcggtatttcctccattgcctctggactacctgtacgattcagcggagccggccatggtgccggcggcttcggacctcctggacacggcgtggtgcacgcatcgtggcaaaacgcacgagcatcaatgctgagcgatgagactagcctaacaaatatggcgccgattttctcgcgtccgccagcagcaggacgcatgcgccacagcatggcatccagcatccacgacaactacaagcgtatgaccctacgcactgttgagcccgacgactccatcctttccgaagccgactccctcgaagcctttgtccacagccgagccaagcaccgcaactcctccaaccctctcttctccgcgcaaataagccggcgcacttcctcgggcatgcgcgcactcgaccgaaaccgcagcatgcggagtcgtgccgacaccgtctccgtgtcaaccttcagcgacgaattccgccaatccatccaagaacgtcccttatcgactgcgatgtccgcctctgactacggtgacgacagcaacaacaacagccgcttctctcaatatcagaactcccaatttcagaaccagcccggtctgtttccccttgctgagggaagcgtatatggccagagccagttgagtctcgcacaagactaccgcggtgctatctccccgctgccgcggttctggagcgagaatagtctgggcagtgctcggaaattggagggccagggcacctctcagcctcagaaagtgaatgatgaaaatgctataccgcccagctcgtctatgatctcggatttggacgaacatctgtcccgcaaggtcagccctagcaaggaccctgatcatccgtggtggctgtcgtcgcctcttgagcccccgcggccgccgaagagtgctgataatcggggtcttcctgtagccagcagtggagagctggcatttgtttgatctctgacttcttcgcctatattttccttgtttgatgtctctctatctctctatttgtctttcttttctttctattatcgtttctggcgttatccggcattgcgagcatgatatccattggcttttctatggttgattcgttggtattttggtattttagtgaagtctctatgctagtaaatctagttctagagccaatagtaatatctctgcttcattgtttgatcgttatcgtagtgggccactggggcttttaggatacaccgcttggctttctaacatggaataatactgtgcgatgcgatacacaagtagtagcatgacttatgagcgggataagagcaccaaagaggaatattaatccctacatataagaactataagaatagtgtagattttgaaattttcgaatatggcgtgactgtacggtgactccatggcccctatttatcgtacatggagattctcttcaggctcaatgagatacagaatacaatatgttagatcctacgtagtcttatgtatgacttctttataacaaatatctctgaactcctaaacttcctccaacattcccaagagaacaggccagacaccacctcacgtgactctatagaggcacggcgtaacaaaagcggtaaacgcaataccaggaaatctctgcgagggtcttgtctggactcggacttctctctcctagcttccttgaaacttgtctttctaatcctcatctgcgaaaaatccctgttcttttccaaaaacatcccaaggcaagaaatcctatcgtcatccgtcgttccccacttatcgcgggacccagacgcgcgctgaaagccctgcgccctcatctgaccctttccctacagcacatctcctagcattttccacacttcgatccggaaacctcgaatcccccaccttccccgaattattcaatctttgccaatatgggtcaaaccctatcggagccggtggtcgaaaaggtgagtcgatatttcgcttttttgattcacaccccacactggcccattgtgaccctccaatgtcctttcttatggcgtcgaaacactcccctttcttggcttctgttatacctctgaaccagggggttatggaccgagtccctctcagttctttccgttgaacaaatagtccgtgctgtcgctcggaggaatcttcctcgggttgccatgcggggtcttgggtagttcagctgagtagtggggggtggttcgagcagcaacgaactggcatcgcaatcctaccaggcagccttgcatatgttgtggaaaagcatcgagtgtaactaacttgttatttttcgcttgttacagacctcgtccgaaggcggggatgactcctgtgtgtatggtgtgtcggccatgcagggctggcgaatcagcatggaggacgcccacgctacaattctcgacctccaggcaaagtataccggcaccaacgaaaaaccgaccgatccggaacaccgtctcgccttctttggtgtgtacgatggccacggtggagacaaggtcgcattattcaccggcgagaacctgcacaagatcgtctctcgacaggatgctttcgccaagggcgatattgagcaagccatgaaggatggtttccttgcgactgatagggctattttagaaggtttgtgcgatgttgtcgttgccgaggtacttcgtgctggatcgctgacttgaacccagacccccgttatgaggaggaagtgtctggctgcactgcttccacggccattatctcacagaagaagatctgggtggtatgttatgaccttgaaaaaaaagcccctatatccgattaaaggggtaaactgaccggtcaaaggccaacgctggtgattcacgatccgtcttgggtgtcaagggacgtgcaaagccactctcattcgaccacaagcctcagaacgagggtaagtgcatggaatcatacaagccgctacatgaaacattatgagggtctgacaaataattcaaacaggcgagaaggctcgtatcaccgctgctggcggcttcgtcgacttcggtcgtgtcaatggcaaccttgccctgtcccgtgctatcggtgactttgaattcaagaagagccctgagctctctcccgaacaacagattgtcactgcataccccgatgtgaccgttcatgagctgacgaatgatgatgagttcctggtgattgcctgtgatggtatgctttctattactccctctcgctattatcattgctaaacaatctacaggtatctgggactgccagtcttctcaggctgtggttgagtttgtccgcagaggcattgctgctaagcagccccttgcccatatctctgaaaacatgatggacaactgccttgcctccaacagtgagaccggtggtgttggctgcgacaacatgaccatgatcgtgatcggactcctacaaggaaagaccaaggaggagtggtataaccagattgcagagcgggttgcgaacggggatggtccttgtgctccgcccgagtacggcaagtctcccgaggaacccgaaagcatccccacttcttcgtgctgacgggcagttcgtgcagccgagttccgcggccctggaatccggaaccagtttgaggataacccggatgaatatgacctggagatggagcgttcgcgtggattaggtgtccgttcgggccgcatcatcctcttgggagatggcactgagctctcttcggaccagaacgatggcgaactttttgaccagaccgaggaagaccaggaccgtaccaaccaggtgcagcacgaatcaagcacccggaacgaccgccaggccactcctggtccccaggggaaacaggagaatgtcagcgggacctctgctcaaatatccgaatccccggcttccactgacgccgagaaagagaagtccgcatcgtaggctatgaacttatgaaccgtccatcgattggttctccctgttttggtttcaacctggttttattttccctgcccacagtcaacgacccttccccttgattccacgatctatgccttgttttcctccccttttctttgttttgcaattagttatcgtcgggctccagtcccgagcctgttacaccctttttttaactccttcgacttgaaatggataattgtcagagacgggacatgcggcaaagagacacagacggaattgaatgagatgaaagacaagagctttgaatttccatggaggtcgatgttgaaagagagagcccttcgccgggagctaaatgggcctcatgaatacgtttcttactttatgccatcaccacaacgagttaccgcagaaaatgcccgctattgacgagccatttacctacaattcctatccgctttttttccggggtatttttcttccccctcctaattcccggtctattccctacctacggtcattgatttacctatacgagaatgagtactaggggcgcaagctggtagagctgggtattgattgagattttgtcaggagcaatggacaatgacaacgatcatttacataccctttggcgtatatccgatgcattgcgcattttctttgtaccttggtagatgtttcattgttctattctggcaacggcgagtcaggtatattgacgtaggccaagccaggatgggaaactcctaccatcaagtcttaccaattgcgtatttgagtctggtagcaatgaagcacaacagtactccgtaaaaaagagtacattcaacggtaaggcgatgtatgacgtccacgatgtccacgataacccctgtaacccacacgtggtcggtgtaacccagtcctgccaagcctttatttgcaatctcccggccgtatttgcaattctcggtattgtaaaattcaaccccgtacactctacatcctgagaccgtggcttatgacagtggagttcggcccccactctttccccaaacagaaaattaccagtgtcccctaaaaccgggttgccgtcattcagggttctacatcaattctctccctaattctctcggttccccatcctttcattcatttccctcggaagacatctctcattcattcttcagggccaaatcatcatgtcgccttctacttctcccgccggcaagcgcaagcgcagcgcctcccaccttcccgcgcccgtttccaagaacgtcacagctgacctccagtcgtcgtcacgcgacgcgtctaacgaagaagggggcaaggactcaacagggcccgccaatgccaacccccacaacgccaatggtacccgccacccttctaagcgggcccgcaaggctgccgccgccggtgctgcaagccacaccgaggtgaacggggtcaagccggccgtcaacaaggaagaccccggcgagccatctgcgactaccgccagcaatgagaaggaagatgggcctcggtcgcgccccggtttacatatcgatttgcccgaagatgatgagcctgttacagaggagcagatggcgcccccggtctttggacgcctgcaggatcccgtgggttatcatactaacccaccaccaacgggtcgctcagtacgcgtttatgcggacggtgtcttcgatttgttccatcttgggtaagtgatcacacgagcggatcaggttttggtttcagcccccaatttcttcgggctgtgggcttgctcaattgggtaatagttgctgactatcactttacagccacatgagacaactcgagcaggctaagaaggctttccccgatacttatctgattgtcggtgtgactggcgatgaggagacgcacctgcgcaagggtctgacggtgctcagcggcgccgagcgcgcggagactatccgtcactgcaagtgggtcgacgaggtcatcccctgctgtccgtgggttgtgacgccggagttcctgtccgagcaccagatcgactacgttgcccatgacgacctgccctacgaggccgctgagggtgatgacatctacggtccgatcaaggaacagggcaagttcctggtgacccagcgtacagagggtgtcagtaccaccggtatcatcacacggtatgtttcacctcccacatcaaatccaacggactacagctgacattattacctacagggttgtccgcgactacgaccaatacatctcccgtcaattcaagcgtggcgcctctcgccaagaattgaacgtatcctggttgaagaagaacgagctcgagatcaagcgccatgtcgtcgagttgcgtgataacatccgcaacaactggaccatgactggccaggagctcggccgtgaattgcgccagatctggcagaacagccgtcctaacagccccgcgcccagcgcccgcaacagcatggactggggaatgcgtggacccctcaccagcccgacaggcggcagcaagtcgcacctgtcgcgtgtgggtgcggaacacaaccgcgcagatagccccatgggctcacgccgcaatgaggatttcgctaccgggtacagtctcggattgatcggaggcgtgcgtgcttgggtaggttacatcccacaatcgctggatatgcagctcagctttatctagtttaacttgtactaatgttcctcatacagatggcccgcagtcgtcaatctctccaggaaccccctagtgggatgcacagtcccactgacgaagaactcgagtccgagcataacaatggctatgacgaggaggtgcgtggccgtgccggtcacgtctctgctcagtagatgacttggctgggtgcctttgatgccgtatgtcccgagaagctacacattgggtggtaattatatacctgccattccagtccctatagccgcaattccccccttttccctgccccaccacactttcctcctactcttttgcatatgtatccatcttttcatcttgcattcggttcgtgtcctatacctttacaaattgtcccgtaactggcggtttctcctatgtcgggcgcttggtgtctttttttttcttcttcgtgaatagactgtatgccggccttggcttgttcaagttcgatgcagttcttttctgatttgttttcttacttgtcttgatttttgctttggttgtggttcggtggtttcaacgctcctccttccccttaatactctcccaatgaactttttcttgtttgatgtctttgtatatggccttgatttggtggtgatgattggtgactcctttcctctgatcatgctctgaccatgatctttgatgttggtatatccttcaaggccattccttatcacctgtttgttctagtttgtttataaaagctggaattgatggacagctgatcgggtatggtacatcacctcgccttgatcgtgtccggatatgaactgcacatagattgagatagctttgtttgatgtttcagtttccaattgcgtggccaattgaaactttgcaggttactagatctgatagatgttgtgtcagtatagaatgtatgtcctgtacgactatatccgtgagcctgctagccctgatctacgtatcgtctcttctggggcattgccacctataggtcggataagttatccgtttacctagaccctgcatatggattgccagacttgaaaagaaaaggaaacctgtcatccacctggtttgtttggtagatgtatagacgaagtacggattttgatatgttgcatgccatatgataaatgccctggatactatctcagagagcacgtacaaggaaatctcgacagttcctcgacacacctaaagcggctagtggatgcgtgccactagcgaaacatagcgtgtgggtactaggtagcccttttcaagacaaaaatgcggcagtaacaatggatcagaggggccatgctccaccttggagaagctctagagtattcggtccactcagactacttgttcttagactgccaagtcgtctatatgtactccgtagacttcgggaattctgcagatcccgaaattagtgttaaaatgccccgtcaattactgaggttcgatgacaccgagccgcgacagagtcagaaaatcactttgacattcataaacagagtgtccgggcgaaaactcgccaatcaagagcaatatctagagcggctccagtaggaattccctctggtgaacgtgcaatccattgattttgccgcaattccatacaaagatcaattaaagatcattcaagaatcagatatactggcaggtgtccatggagctggtctcacacatggcatcttcctgccttcaggatcggccatggttgaaatcctaccacctggcctaaatcacaagggctttcgcaatgttgcttccctacggggtcatgactatttcagcccacaagggcggctggcactctgaagatatttacctggatgttgagcgatttacgaatgcgatgaatgtagccattaaggcaatgtataacaagtgtttgcgaagttatgatgtttgaatagatcatttttgccacattaagtctttctgttttcaatccatcccaatcgaaatatcgccttgcctgggttcttttactagctatatctatatgttgaaaggtcacctgacatccattgtttgctcctgctatatagtcttccacaaacctgtagacagtttcttctttctccccacaaccgagaattttctagaatcacctatctccattaagaaactattagacagtcactcaccattattatactatatacatctttacaacgcatacaacgcttgatccgcctatatctaaaagcagtgatcgcatctcctacctcatcgcgatttgcatgattatcgaagctatgagtggctttgcaggagcttcagcaaaacatatgtcaagacgaagggacatcggagttgaaacatcgagcataatttgcagtcatctcttcacgcctcacaaattcctcttataccaacgctgagaactgtgtaatcacccagattaccggccgacactggtggcatagacgtgtccgctatcctcgaagagcgggacacctagacgaccatgatgactttgtttttcttctgtgtatgatcgttataggcatctacaacaccgagaaataaagcaatcacgagaaatttgacggtcaatgtccccacttatgtgacgaatcctccgatatgttgactactaccctactccccatggtcttatacgaggatcccttctgtgagtcctttccaccaggctgttttacggtcgtaccactaacatttcggtaggatgtggccacgaggtataaccagttcctggctatacgagtccactttctctactccacccttcctcaattactttgggcgcgttccttgcgggacaaagctcataggatcatgagtggaaggttcatatcctagcttggtgaggggcaccaatagagcagacagacaaagggttgttggctggaacccagatttacatctacttcgagtataacgacaacactgtacagaattcggggtgggtgtttgtgaagagtggaagaagatttgcgcaacatgtttgtattattgctacttgcccacagtctatggtttcggtttcttcatcacatttgtcacatatcatgtccatgaccagttccatgttccctgtagacattttaatatagaattgccattttatcgcaggtacgtctttatgagagaagctactgtgcagaataactagtatggaaattcgaattatactattgtgccattattactttaaagccacgctgctttactcgtataatatggacacatcaaagtctaacataattatagcaatttaatcaaacatcatctcgtatcaggcacgcttgcagcatagactcaggttataccaaagtcgtatagaaattatagtagtttgattcaaactctcattactaacggtggcatcttaggttccctagggttgtaggacaaaagatttcgtggaaatgagatgagacaattattagataatattaatgtactaccttgtcagaattgttctcttattctagcagtaagttgtcatatattgcacgagccgacctagccactatcgtcatgtacacagggggcatctctgttatcaaaaatgagcatgttttcattgtgtacaaggattatgtggttgagtttgggccctctgtgataaccctgcatgctcagctagtcagttttggttttaggtgcatatggccaagtgcagatctcattcattgggcgtgggtgaatggagctagtcagttttggggtttgttatttggtatctatttcgaagcagccgtactagccccaagtgttgataatgaattccgtcgctttggcgatatgaggtgaaatcagagggagccatggaggggaaggacgctgaataaacaccgaatccaagctgttgaaaagaacgtatactcctttttcctctctagatcccgacatcctccttctcggatattctttgtagttgagtaatatcccgaacaacatctctagcagactgatattgttgcttccagcatttttctgtgatataataacaaatatgctcttgctcatcagatggaaataccccttcctcatataaagactctatcttctcctcatcatcaaagctatctagctccggaaagggttcgtgtcctgtcatgatgaaataaattgcggagccaagtgcaaagagatcagtgtgcacatccgcatagtccccgtgaactcgcggtcgaaatgactttgtacactcacgagatagcccatctagtaatgtttcaccatcactcgacttgagcatgccttggaaatcagcaagtatgaggtccaagttctcatcaaggagcaaattccgaacatttagatcacaatggataacacgctttgaatggatataactcagtgcctcggcaggttgttggcaccagttaagccttctttcgagaggaataacgtgatccgaggtgatatagtccattaagttgccgtttggagcatatcccagaagaagaccatgctcggccagccccttggattggattattcgcggatgagttccaaggatgtcgagaagttgagcctctacttcaaggctttgccggtccccaggaacatgtgggtatttcaagacagtcgtgtcatcaacaaggccgatgtaacttccaccaccccaaccaatgatctctgaaacccccggaagatactgatggattatccgaatttcgatgtgggaggcgggggaatcggatatatcatttccagccggtgtcgtatcctcctatattaattagtaattatacacagtagactaaagatggccgagacttacaggctctggtttcaatgcagtgctcgctgatggaatccagccacacaaagccctgtagacggaaccgaatacaagattaagcggataacatatggttctgaatagagtcgagattactgaaaacattatggaagggttaattattccctcttcttcgtgtcttggcttttcgaatgtactgggacgtgagaagggggaatgggtagatgtatgcaaactatgcaaattttaaaatatgcaaacccctgtagctagccatggatgtatcggctaatccccctatttcggaaggagatcgggttgtttgcatgaaacggggttggaagatattcatgcgtttaaggactgaccgctacagtcattggcccagtacgtagcccagtcctgcggtaacatatttgaaggtagttgccctttgatctcaaatgagatatatatgatgattcttatattgtatgaggagaagaaacctcaagcagcagtaatagccaacctaatccccctcctcttcctttcttccatatccatcgcctccaacatcctcccaaacccgaccctctccctcggctcgcataatatctccctcaaaccctccctcaaaaggccgacgtccctaaccaactccccctcaacaacccccttagcaagaatatcgcatctagccgtaacagccaaatcaaacacatccaatcctctaaccccaagaatcggcttcacccactcctccccaatcccaaacggaatcctctgacccgacacaaccgcctccccagtactccccaagacactagtaaacctccccagatccaaactcaaccccaactcccgcaatccctccaacgaggcgacaacatcccaaaaccgcacccacaactcatcactatgcgtatgcgcatagatcgaccctttatgatccaaccccgccatcggcacccagatcggcatccactggaccgtcagtcttgaaatggcattccgggcaacaggcgacagcgacgctgcgaatgcaatgaaggtgtatagatcgtcgacgtcgaaatgcgaggctttatacaggattggctctgcttcgaaatagatggcccgacagacgcggagcagggcactgttgctattgcttagggttgaagggagaagggagtgagtgtgtgggtagaggagtctgtcgctgtggcctggcacgcggccgtcgtagatgcgccaccgggctggggttgtggggcagcagtggcggttttgggttagggaggggtttgacggaagttgggagttatggggcttttgatgagggctttgggctggggttggacagcgcacatggcggattttgccttttagttggactaagtggatggtttgaggggtttgggtgtttggagttggggagttggtgaggacataggaccatattatttggcggagttcaggtggaaggcagagaaggggagaatcttgaggttcgaattggaattggcttgatgctgattctggattccagtctataggtgggtggagattgctctctggagagcagattgcacgtgattggattaaatcgcggacggtgtcgcgccaccgatggccagttggataataatgccaaatagaatagggatcacgaaggacccaggcgtcgaagtggcgcattgggatgtatagaagtgaagagtaagaaatacggggaaattatggggcaagtgggcttttatggagaaatccacaattggtatagactaactagtactggactagacttatatattgaggtcttggttgtaacctaatgacgtcgagacagttggatttgggatttatcccgtggagagggcataacacagatataatgcaaaagtgcatattataaagtgctatatctattgaagattccaaggttcgtcattcttttcagtcatgtacgtgtagttagggatttgcatgatcacggcgaattaccaactgcggtctagcgtatcttttcgggtttagcgtgtttatatagagtccggccgcttcaactttctgctttccctgcttttggtgctgccaagtgtaaggggcctgaagtacgtcgtcattgttgtcgcccgtgcgcttggcactcctacaattctatctttctaaccatagagcacatatttccatctttcataggattgtacccttttcattcctagacttacatcgtagcatacagaagtatatagacaatgcaatggcagagggggctcctagccaatctaatttcagcaaaggatagaggtcaaagcgtctacaccctaaccctaaccccataacgatatatacaaaggcttaggatgcaagcgcaaaactcaattctcctgttctgacccctgcgctctctcctcatcatcggcgtccttgaaactctcatcctcagtggcatccttgtatccctccgcatcacgatactcctccactccactatcacttccgttttgggcaggactctcatgcgcaaacaccacataaatcgcacaagccaagataatcccagacccgatccaactaatgggagtgagcgtactcccccaaacaaccttatcatagaataccgcaaagaacatctgcatataaaccatcgacgtagcacgcgctccctgagcgacaggcttcccatccgagaccgacgcaggcgggacgtacgacaaacccgccgtcaacaggaactgcaacaagaacccgcagataccgagcccggtcagcagtgtccattcaacggccgtaataggcactcggaacggcacagaaggcacgaccgccatcgcaatcaaagaaataatcgtcgtcacggacgagaagtacgtcacggacacgagggggtgcgcacgacggccgataatacggatagtactgtaagcacccgaagcaccgatcacgccgatcaaggcgacgattgtcgccaggatgtggtggtaggagtctgtttcggagggtggtttttcgactgccgaagtggacaggcctaatgcccatgcggcggctgcggttggggttgcaaatgagacgcttgggtcgtgcttgccgaaggggcgggcgatgagcacgacgccgccgagagagattaggccggcgcatagctgttttcgggaaaaggtctcgccggggatgaggagcgagcaggcgtagcaggagatgattggtgagaggaaggttatcactgttgcttcggagagggggaggtattgcacggagtagtagagacagtaaacgccggtgaagccgaagagggcgcggaggaggaggagaccgcggactggacgtgtgcctagtggggagggtgttgaggcgatgtacatgtataggtagcttgcaattgctgttatggacatgcgggcgaagaggatctgggggtgttagcttggtttgtaataatggaggtataggaatacggatatgtcgaaattatgtgatatcaaacatatcttccctttttctgtctcttacctggaaaggatgcatagagctatggatttccaagatctgcgtcatgacattcatagaggcagcgaaggcctgcgacagtaggacaagtcccatacccttattgcgtagccaccatactttccatgcacgacggggtcgcgcagctgcagcaatagcggcagcgtcgtcatattcatcgtcctcgataggacggggttctgattgagccagtgctggtcgggggtcggcttcgctaccactttcacagttgtagtcatgttcatcctcgccttgagtttgtgaagatgatctcttggatctcgggttcgatctcgactgctccacccggatcggcagcggtgcgtccggatgatcctcgtattggtcggcgcctgaggccgaatcacgttttgaagccatgctgggatgtgagatcttggcgtcgttattggagaggcgattggtgcggggattgtgggggatggagatggaggtatctaagatgacttttcctctctctgaaatcggatcggattattcttctatagagtctgagtgtacagtgttctcctcgagaagagatatgcagataaacaatatattcaggcgaaaggaaaggattcttatatctgcgctggactgccgatctggttaaaagagatttcagctcgaaatgcgcatgacggccgagtggagcccccgttgaccactgaccgcttctctttttactttcttcttgctttttctttcgacttttcgtgacttccatgatctttgaatcgacttgactcgaactggtttgcagatttagttgccttgtccctggttgtgtactaccatgtactccggactgtacaagaagcacaagcggcacacgacctacctcatgcacgatctactagctacatataaatatgcacctaacggatatttatccgctttcctttcctttctgtgtttcatttcatttcatttctcattcaagtttcgatttgcgtgatattgcttactaatcgccgcttcaagcttccaaggttccaaggttgggaatcgagctacccagagatgagctttgtatttaagggtttatgcgatcggcttaagtcgtagatctagcgagctagactatacaacatacatatccatgtcatagaaagccacagggcccatgatctctcagagttgaaatcacatggtctgtgcaatatatcctcttgcacttgagtggaacctcagggttggcttcatgatcgggaccacccggatacggttacatagtattctgcgagcagcctagggtagagatacaatctgagcttcgtagtacacattaatccctgattctaatatattattacagactcagacaaatttgcaccgaagatatgttatagtttctttttctttcgttgcgtggcaggccgaataaatcgaatggtacacgtatgtacagcgttgtattcgatatcacgtaggcttcatagtggagagcttcttcacggcactcagggtcgagccaatcatgagagaaaatgagagaaaatcgtgcaaagtcggtccgaacccgacccaccaatcccgaagcggaacatctaagacggtagatccaagtcctccatacagactgtcgaaggacagaaagtgtgcttctctttgagtaagatgcgtccttagtacagaggccgtacttgtatgtttccatctcactatatgtcccgaaggacaggatagttatcttgctccagcttatgtatggaggtggaagatactcgaccgtggttggtcgattattcaagatccgcttttcgcgcaatgtggggtttgaacacccgacatcactggctgttgtatcacgtgacttccaaatagcgtagggccagttatgctatgtatcaaaaagacccacacctgtataacctcaaaaaggacatgtaaaagaaaaaaaaaaataggtagcttctctttgattgagcgtgtcatccttagtgcaggggccatgctaatcttctctgtatattttcatttgaccatatgccccgaagggcgaaatgacatccttatagttcaatataacctcaattttcggcataattataccgcctatgtattactttgggcttaggcacgtgataccaggttacgtaatactttacagtccacagcagatttacagttctgttcaacctttatatcatgcattctctagatctggttatttcggttactgtatccacttgcctcaaacacctaccaaagaaatagtacatatggtcatgttcgttaagacaaatgatcagttgctgctcacagatcttcatcaagaatcagaaagagaacctgttataagtcattcttaattgtttagagtaatttacacacgctaacaagagttgcggtcagggtagttacagatttaacatacctaaaatagttagttaaagtatgccgtaagtaaaatgactataccgccagtattatgtccgacggcgaagtgtgaggcacctacggggtatgtatctagatgataaacaaagaacagtgcagatgaagtggtatgaaggcatagttcatacgatcacaataacatcgaccttgaaaagcatacacggctatatttatacaaaagtaaacgtatcaccccccttctcccgcaacatatttccagtcctcgaggtaccaacaacacgctccaacttcagcgcatcccacttcgagaacagcgcacgcacaccagcctcggcagcctcgatcaaaaccgcaggatcaagacccaagaacccaacgatctcgccatagaacagcgcgttatctgggagcccgtacatgaccacacgcttaacaccgcggatctggtaacggcggaagtggtgcgcgcgctcggtatacagcagcacagagtggcggccggacacgaaatgactgcgggcacggttagcctccttcggctcagtgtattcggagatagcgccaaaggagacattggttgtttgcgtggaggtggcgaagtggttacgcacacggacgaagtcgaggtaggaggggatgaagatgagggtgccggcgccgcccttgccacggccgtgcgtgatgttcttcaccagagtggacagtatagttgttgtgaagtgcttaaagcgcgcgtcggggtctttaatgggcgacgtgctgtcgatgcgggtgaaggtttgcttgacggggactgcgagtgggagctcggttatggcaccggcatatatgggggttgctttgaggcgacccgagacgttttgcatatgggatgagaagagggcgttgatctcaggcgtgatgaaggatgagaccactacagtttgtcggacatagcgggcttggttgtccaagtaccaattacggacacggccaaagtcgcagccgtgcgcttgtttcggttgcaagttcaggtgctggaagatgtagtcgacgtggtcccagttctgcatgagcatggcatcagcgtggtcaaccactaccagctcaatcgaggagaggaaatcatgatcgcgcttcttgacgtcagactggtccatgatcgtacgcagacccagtggactggccagaatgatgtcggagctgtagaattgcgcgaaatatttgactgtcttgcgcgtgaacttgagacccagtcggaacatgtcgtcgtcattgccgccgaaaagttcccggaaatcctcggtcttatgctcccaggactcatcattcggcgccgagaacgagtcagtgaaacgttttttgttctcttgctgctcgggctgatagatccgagtgatcgcatcgagaaccttaacacatgcttgtcgagtaggcagaatgtaaagcaccttaggtctggtaaatccttggtcacggcactcgatatcggtgtccgggtccttggacaaacgggcgttgttttttaggacttggtctcgggtcttcagcaggtgattgacagtgtgcaaagcaataatctcgcgcatctcattcgcattagaagcagtacgggcaccgtagagaacgtcttggtagttaaacacatatggcgcgatgatctgggcttgaccggtgattttaggcaggagctcggccgcacgagccttcagtttttgtttaagctgcgcgattgcatgttagtatactcaaaatacaactcatgtttattccgcataccttgatgttggtcgtgctcttcattggcggaaggattgatggactgttttctcccgtttcgggaacagtatgtaccagtcgtagcccatccacctctttcttgacggatgcccatttgttcgattggataggctcaatctgcttgatcaaatctgcactctcgcggagatcgaagtgcttctcaaaagcagcagttgggtcctcgtcctcgtctacctcctcctcttcatcgtcggacggcgcttgggcttgcaaatcatcatcgccctgctctggttcctctggttcctctgcggtttctgctatttgaatctcagcatttgcgtttgcgtcggtggcaatcttgcgcttcttccgagctggtccgctggactcattgggttgaagtagctgaaggagttcattgtatgggcgttcagtattctcgtcttcttcgtcgctgctggaaccctcgtccataacggtctcatcaaccaattcctcttgggattgctcgctagcatcatcttctccgccagaagaatcgtccgatctagtgataattagacacagtcattagactccagactgtgagaacttactcagactcgttcaatcgcgaagtcgcaaaggaattgcgaccaccacgaccaccgcgaccgccgcgaccacgacctcggccgcggccaccacggccaccacggcctcgagctcctctaaaagaaccaccacgaggagcaggcatgttgcgaataactggaaaagagtgggcaattccaagctgttctggccgaaatgagaattttgggggcttatcttatcttagcgcgaaatttcccacacacaacagaatcggaacaatcagagcggctcactccaccaaggaaaaattgaacctccgagaaacgaaggaagtttggatcttgaaacttgcaagatattccatccccccaaaatcaatcatggccgaagattctttccttcatctcgctcgccccctcggccccgttagtgtggggaccgctcctaccactgcccctctgaacgtggtcatccaaccccaggtatgttgcgatatgtgtgtgctatatgatctgaggggtaaagctcattcctcccaaggcaatcttttcagttctcgaccactctcttcgccgcaatgccgaccaggagcgagttatcggtacactgctcggaacacgatctgaggatggaagtgaggtcgaggtccgatccgccttcgctgtcggccactccgaggctgaggaccaagtcgaagtcgatatggaataccacaagcagatgctggctttgcacctgaaggccaacccacgcgaagtcttggttggctggtacgccactgcttccgagctcaacactttctccgctttgatccagaacttctacagcggccagggtgatggtacctggcctcaccccgccgtccacctgactgtctccactgaggctggaaaggatctcgagactcgcgcctacatttccgcccccgttggtgtcaccgctgagcgtgctgccgacagcgctgctttcatcccagttccctacgagctccgatacggcgacgccgacaagagcggtcttgagtctatcgccaacgctaaggatgccgaggaccgttccacttccgtcacttccgacattgaatctctggagcgcgccattgaggaggtcctgtctatggttgaccgcgtctcgcgctacgttgagtccgtgatagacgaggagacccccgcttccactgccatgggccagttcctgcttaacgctctcgctctcgctcccaaggtcgagcctgccgacattgagcgtgacttgtatgttaaatctacattatattccctggtgtttcttgccactaactttccacagcaacaaccacatccaggacgtcctggtcgtttcttacctcgccaacaccgtgcgcacacagatggagctttccactcggctagcgaccgcccagcttactctcggcggcggcggcgagggccccgctaccggcgaccagcgcaatcagcgtggcggcaagggcaacaaccaaggcggccgcccccgccaggaccgcaccgaggagacccgcgcatgagatgtttcccacagcaaaaaacgctgatgcataatgtgaccaattgcgagaggaacactcctctccaagtgaacgtggatgtctcgtctcacgttcccttccctttctatctcacccttccctgacattattacttttgggtctttcgcttcttgttcaccaaccctctaccgccttcgtccctttttttcctttttccggcttcctcttttttttttactcgcgaggcttacatgttctctccggagctcacggactgtggcctggtcccatcaacggcttccggactcgctctgttttgacgttcaaacacggtcttcaacacctggtgctgtggtattgagaccgatttactatcaatatgattggtataacatgtggtgatggttgatgaggtgacgatgtcattaccgttcgacgatagagaatattcgggggtgatgagtctagactgttgaagatgagagatgggtctgcgagacccgatctctccggttacgaagtcgcatctttctaggcgcggcgttttcagttatgatgaaatggacataaaagttctagagcttcttcgtattgtatatttcccaccatttactattccggctatagccataagaggctcacgttatagtcctccttggtcactgaggtttcgtatggttccaattctatctagatatcaagcatttcttgtcggctaacgtccaacatatcagtatgtcacttaaatgcgacagcttcaggcttgttgctatactcttcatcgtcctcttcatgccggaccacccacctgttccggctgaactcatctacctgtgctactcaagcagcagtaattgataagcaagctggatggaagacacgcttaggcttcagtattgagatgttcaacctctatgtttttgttgcctcgctcgcaccgaagagtctctctttttgtcttcctgaaagctcagatggtggactggcgtgagtgttgacaagatggcatcggacgggcaatcatcatcataatctaagagaaagtagagattccgaagatatattcattgactagttgtatacttgtcgggggtccgaatcgaatgtttctgaggacgcggaatgcacggctatgagttctatttggcgcaccataacacggcctttgctcctgcgtgcgacatctgattttctaggggacaatgtcgccaataaggtagattcgaaggaatatttcctggtacagtccgtctggggcatcatgggggaggagccttgtcgtggatctggtatttccggtattgttccgcggttagcatagtcaaaaggtactttcttgtcttttttttttacgactagaagcctcacattcaatcagataccgtaggtctattgagagagatacccatccaaagttggagatgtcgttaagctgggaggggcacggatttgacgagattgttgtcagtctaggactgcagctagaaggcttatatttgttgaattttatggaaggcacaaatggtgtattagtttacaagttagcctcaatgtaggtatgtgcatgtagatacagccctagacctcatgtttcaaagtggggaaggaggctggcggatctgaaccttaatactttaatttgactatggacgggaacaatgtagagacgactcaggctcttggcatggttctactactgataaactacagtatataacgaacgtggttctagcctagtttgctcctatcaccgtggtcaaagcgttgtgatgtcccagtgattgcatcgggcgagtgggagggcgcaaatgcgagtcccgatgtctgtcttacctttgatataaataaagtgagcattgggatttgataaatttccattgtatttctctagttatttcttggtattggaaaaactagctgtaaatatattggcgaaaagaaacacacgttgggcattaagtcatgttcgtcgtgacccacagcaactgggcaggaattggtggagttattgagggtatatgttcagccaatcgtcttacgcttcttcgaaactgactcctcggtagcatcagatccacggcgggttgcagcacctcttttccccttgcccttactcttcttggtaacagtagcagcggcagcggcttcggcagccacaggatcctcgccagcagcagcagcagcggccgcagcggcagcacctttctttccagcttccttagcaacctgatcatcattctggtcaaatgctttgcgagcttctttcaattcacgttccatgcgcaacagctcctgtacacggccgagcttgttctggtcgcgacgcagtgcgaagcggaagtcctcaactttgatcttctgacggcgggcgtggtgtgcgacttgcgcggcgccgtggcagagttccaacacgaagtcggtgacaatttcgtccagcacgcggactgtctcgggaagtggttcgttcgggaagctcgggtgtgggctggggtcgccgtaggcgagaaggagcaggcgaactgttggatatagttagtattgaatttggctttgtaacttctattaatgaatttgcatgggctgccggaacttacgttcattctgaaagttcatttgacccttgtgccgggccgtacgcgcacgtggttcggccatggtgggcttggttgtagactcttttttgtcctttctagtcgatgtagatgccgtgtcgggtgaactaagagtccacttaggtccgtatccggcacaatttagcactgtatcttgctcatcgaagccccaattaggcgagagttcagagacaagagtcttcgagctaggctgacgtgatggattgcgagtcggattggacgagtcagtcttcgaggttgatgagaaggtgcttggagcttggaggtgagcgtttggaggtgctgagattgtagtctcaaagggacagattggagtccgagtccaggtgttcagagtactcaatccagtgtgtgatggcttaagaggtagcggagatgcgtatggcggcaaggagaatgatacccgcttggccgcttggcccgtgcgcttggcggacataccaggcagaatatgctagactgggggttagttagcaaccttagcacatgcaggtacctggcaagttacggtcgcaattctctttctttgcccaagtgacgggtgaagggtttacagttgcaacaaatggtgagtttatgtaaatggcagaatttacgagagcaacttttctgtgagaagtatatgtggcttggctttcgcgtggcgttcatgttggaaccacaatgatagtatgattactgtgctaactatcacactcacctagtctgctcttttcaactttcaatcgttgcttctcgtgattctcctgataatctgcacgagcagctatgcgcactcgataatgccggggatcatggaccggaaccagaatgggtaggcgaccacctgaggatgcgcatccgggatgcaggaagatgacggggagactgatagttctttgatgtaggatctttgggatattctggaagtctgctcgggtcggagagcgactcagcccatacgtcagcatatgctgtgtcgtgatggcagtaagttctctccacgagtcccgatgtatgaagaaatatacatactgatgttgcatgcaggtgtcgatcttcttcggtgattaacattgcttaagtctcaatgggtgtttggaggggaattcctacgtgataatcaatgcttgtggtagtccccaacttcgatcggacctcaagtaaccttagtcgggggttataagagattactattactatttgcccttcacgtgatggtatccagatgcaatgagatattcagacgaacaagaggttcatgatgcggtagtatatagtacataatattaaaatctacaaaaaaaagttccaaggcacttcttcaggaccaatgcgtccaaaatacttgaccctccaaaggcggcagtaaaagacaaaagggtattcctattttacatcttaggcttcaactttgactccaacttctctaacccattgtcaatgagctcgtcgtgcaccttctgatcactgtgaacattggatgcgggctcgagggtgagaagcttattagttccatccgaattaaggccctcatccatctcctcgatcgccacccagaggcgttcggggtcgcggagataacgcaaactcttcatcgtgtaatggtcgatggcaaagccttccctttccatcttcgtgattgcactagcagtttcagggatggcctgcgcattggcgaatccattgatgatggtgttccaagtcacctggttgtactccacattgtgcttggccatcatctccttgactttctcggcggcatcgggctggcgactgtaattgaaggcactgaggaggatggtccaagtacgatgcgtgggtgcgatgtgcttgagaggtttgccagtgatagtttcttttggtatggcagaggtgtcaagcatgtcttcgacgagacgtatgcttgaccttagtccacggctgcttttgcggaaggcgatgaggaattcattatagacgtggtcggtctcgaccagaggagcgatggatggatggccctgctgcacgagctcgcggaatctgtcatacatgtgatgcacttgtgatatccgattccgacaacggaagaatgtcgcgatcatgaggaacaaagatactggagatggtggggttttcaattcaagtccttgacttggcggcggtgagtatgagggagggagtagaaggagttctttgagcggtgtgatgtcgtggattttgttgtacatgtcgagcatagagtagaaaactcccgagggatcgctctcgggatcaatatgcttggcggtaaaagtgaaatgagcgtggaagattttgctgaaaatgtatgggttgtttcgtaattcctcttgcatctcgacttcccgcaccagctcgtccacacgaccccggtcgcctcgagacaccgcatcagtgaggagagtcagatatgtataagaatcgaattcgtggtggtgattcttcatgaactgaagcatgtccgaccccaattgaggatcaccggttttgtaagcattggcgagcacgagattcatcatgtcccggtctggctgaacacccattttgagaagccgtgggaggatccggaaatttcgtccgctggcgttatcctcaacggtgtccagggtcaggagcttgcaacagtgccgtaagactccttcagagtccatggaaaattcagggtcattgattttgggaatgaattcgagagccctaagggcatattccacgtcgttcaactgtgtgaatcggtacatgtagcaaagtgctgtttgcgcttccatcgtgatgcctcgctcgttcattaaacggaaactctcgtagccacctaagaagcccgctcggcgaatatagaatcgtatacccctttgtggcggggagataattggccagtcctttggatccagggaagttgcaacaaccgattcgaatgtgtgggcaccctttgtccaatcccggagctcttcataatgaaatctttccaagtaagtcaagcaatcaacaaccatagttaaatctggcttatctcgtggctcagttgtgacgagtaaaaactctaaggccattgccgggttattttgcagaagccaaatggccaggcgttgccaggcccaagccctgttagggcgggtcattgccagccatgcctctcgaaacttgccttgacagtcttcgagaagcaaggctagcagttgctcgccatcttctctcagctttggcaatgcagaattgtgcaagacctcacggccatgtgtcttagccttgtgaattgctccatatgcctctttccattgacggagacctagctcacgcatgtaaagtgaattcattcgcattgaaagcgccaggtataacccgcgatcggtcaaatgtcttcccttgtttaagatttctcggttgactctctcagccgccatggcgacaagcttgggatcagcttttcgcacataagcgaccttcttcattttatcattcgttataatcggtgtctgtgatgaacttcgtggttgggttgaaggttttgattgtccatggcctatgccatactgatttgtcgcgacctgatctgattgttcacttgtcggcgaatgtgaactgtcggttgaaccgcggttgtgttgatatgatatggggtcaggagcatcatgtgtcacaccaggttcgaagattgcaggagcattgtatgtggagaggcgcactctatgaccaacattcgtccctgactcccgataccatcggcctagagtccgacattgtggtgacagcaacccgttgagacgggaccgaacgagttggtgcggacacgatgacattcaggagcttgtacccgcagacatttgggggaaagaccaagacgaagaaaataagtcaagtacagagtatggcgaggagtcaaagtccaatgccggacagaaagttgaattccgccattccgcccgattttgccgtggctagtgtgtggcgcaccacatctacttttatcgcttcatcatcttcaactttgaagcagcggaggagcttgcgaatttcttccggtcatacaatcactctgctttccagtccccaaatcccagatattccattcaccctcagtttaaccatcgctcgaaaacatgtcatcaaaccatgccagtcttgatgcggcatccaccgaccgcaaagcccgcctcgccaagctcgcagctctgaagcgcaagcaacctgaagaagacacaaatgaggccagtgcggaagaccaggagctgcctgacgccgattctacgccagatgtgagcacaaaatatctatccggccgcaactacgaccccgagactcgcgggcccaaactgggcttcgagcatggcccgcaagagggccaggtgacgctggaagcacaggcggctaaaattgcaagagccacagcggaacaagccaagaaggatgcggatgccgacgaacccattgatctgttcaaactacaacctaagaaacctaactgggacttgaagcgcgatctaaacgaaaagctcaagattcttgatgtacggatggaaaattcaattgcacggatgttgcgacagcggttagaggacgcgcagcgtgatgcgaaggcgcgtgggcctaagtctaacggagacgagcagggggaggaagtgggcatggagggtgaagcgctcgttgagggcatccatatgcgcgaacgagaggaagcaaagagcgacgaagaaacgatttgaacttgataccctttgtgttgcaggaatgcgagcgttgtctaggtcttctgcctccacctgtaattgtctatattctgtccatttaacttattccttttttttgttgtctcggttgaggcgtccaattgatgccatgggcatattgcgcacaaaaatgaggcgttaggaggtttacaaatcaagatcctcaatgagcatatctatcttagtgtcgttcagaaatcattattggattttttttagttccgctgtccagtgacagatactttcaaactccgcaatggagatgctaatgatacacttagtcaaatactgatggaacacgaattggcgccgtgttccccctccatcaagattttgcgccgtatgaagccctaatattgcagagcaggttttcaattcactttaccgtccgttattcatggcttgagtcaaagcaaggcgcttactgaaaggactcaagcttcgttcccgaggaagctggttcttctccattatgggatcaggcttagagcgtccagattgagactgacgtgatgggattgcttgatcacggtgtgaacggtcccggggaacgtcctgagtcgtagcacgtgattctttcactcgatccttatccacactcttgcttcggcggtcccttcgctcgctatgtcttcctgctccacggtgacgacctcgttcttcggggctagattctcgtctccgtcgccgggtgtttcgatcgtcggttcgctcttgggagggtgagcggtcccttggtcccgagtagaatgaccctgaagaaccctctgttgaatcactgaagcgtctctttcgggactttgcaggtggtgctgatgaatcatttcggcgacctctgtcagatgcgccgtgtttgttacggcggggagatgaggaatcggatcgattcgtagatatcgtttccactgagagggacctagcccgcttcggagactgaacgccgcgatctgtcatatcctcaaggtctctcttccggccacgctcttcctcccgagtagcaaggagttcgtctgccacaccctctcttcatacaagttagcgaggactccaatgcaggaaaatgcagaaatgacaattattcacgtgaacttactttcgcaaaaactcatttggattctcacttgaaagcttgggcatcaattctggattcagtagctgctgagtccttgaaggtcgcgggacatatgggcgctcttgcgcggatgccttgcaatcaaagctatagtgtcgtggatcggagttagtcaaacgtccaaagagcaaatgaaatagggtacatatctcgtccaaggcatttttggcacagtgtggtcgcggtggccctgttggagttggagcctccaagcttcggggcgtttcgatatcggttcattgggactcgtgatgttgtagtttcgtttagaatcctagattggcaggtactttaggtctgaaataaggctattgacgcgcccacgataagaaacacaggcaacatccgacgtaaagctgatcggcgcaaattagcgtctgttaccctttgaagcctaagggaaattgtaggcgcgcgccaagggcggtcgggcgcggcataatgcccacgaatcttcaggtaatcaagaattcagaattcagatccccaacgctccttctcgatctcggagttcattgtcaacattcacgtcatccatctcggacggacgatctagagttgatcggctcttcaaatacccgtcggatctggaatcccctcaaaactcggtacgagatctccctgactatgagccagctttgatatcatgtaaggccccgttgcctgatccgcctagacttctcgctctattgaagtggatatttctcctcattgatcctatggatccctttactttcatgcatggtgctaatgcgcattctccacagctttctccatggcgattgccctaccccagagatatgtctttcgttttgggcttgtgtgaaacgaaattacgcagcgacattactttcaaccaaacaagcttccaccttcttcacatttgcaaatccgaagcctgctgagtgcagctgctgcttgaccttgatctcggattttctttttttttttttgtgaaatttaaccagtctcagcgaccatcctgcagagtgttgtcatggcgtcaaaaagtcccccaggtggagacggccctctctcctttgcaaaggtaagctaagagtttgctccactacctcatggctcatcgctaattccgtgacaagatcgccgctatgcccgcccccctcagcccacattcttcctcggtatctgatgaaaacgaaatatgcgagccagcagaccaatcactttactcaaaagcaaatggctccggtgcatctttgcccagccagcataatgtcgataaaacgccagaggctagttccatagaactagctgttgatgatctagggagaggtgtgcaagacattagcatcacctcggaaaatcacagtgatggaccaagctcgtttgttagcggccaagatgatggcttgctcaagcgggaaaactcttttgaagatgatcgcactcacctttctacctcatccacaaaaatgaccaactttgattccaagagtcttgcctcggtgacgacctttgcaatggatgaaaaggactctgtacgtcccgatgatagtgctagtgtgcaagcgattgatgaagaggagtcgctttccggacttgcttctggggctccaaactcagtggcaggctctgaagctggcagtcgtgcgtttcgggatcattaccgagatggcattcctacacgcccacgcggaattttgcccgtgcctcctctctttggcggtccccagccggtgaatggtgcaattcctccagattcaatcgcgaataatttcgtgattccagccaactccgatggcattgaagatggtcagatattacatgggtttcccttggagccggatgaaaaactcctagaggcaatgaaatcaccgaaagatcggctgctgatcctgcaattggaggaaaaaattcgacactttatcaaggactgcaatgagcagtctctagagttgcccccctcgaacgcgtttgggcgacttcttgcacacaagctaggagattactatcacttaacacattttgtcgataacaatgtgacatcggtcaggcttcatcgcacgccattctgccggctacccactcctttgtccgctgtgcatgctgcttccaatagcactccacctccagctgtcccggcaatgaaaatcatgcgccgaaacgatggagggcaattcgaaggaagtattggaggttcttcaaacccttccaagaccaactcggaagatggcgatagcggaccagatggagaacgtcactggtcttcttctggtgctacacacgctaaagatcgtatggctttgacgagggaggaacgggaggcaaaataccatgaagtacgtgaacgaatctttcgtgattttcccgacagtgccaaatcagatccggccagcggtgactcgaatcccaacatgtcacgctccagctcggcgaacgggcgcaaaaaaaaccagaggcagcgaactcctcatgatgacagctttgaggttcgctcgcagttcaatgcctactacccaggtatgcaatatggaaatggtgctgctcagtacaatgctcctgtaaatgacagctcatatccaaaccaagtaccttacttggtgggacctggcgtgccgccaccctctggtggatacatgccatctagtcggaatggtgccatttaccctgggcaactgaacatgaatgtgaatgtgaatggctcccagtttccagtggcaatgtcgcctcagatggcctccaatagctcgtggcaaggaggaaacatgccgcaacaatctccatattccgggtatgctacgatgaaccagcaggggatgatgaaccagccgtcctcaaacgcttcctcgccggcaatgaacaactatgccgtgcccaatgtgaccccgtatcaacaaaaccccaattggaactcgcctcctttccccacaaatttccagcagtcccagcacccacgaaatggaccgcctgttcactggcccaactatcctcatcagccaatggcttctaacatgccactcaacatgccgcttaacatgaactcaaacatgggctccaacatgggtcttaatatgagctccaatatgccgtccaatatgggcgcatatccttacgctcaataccccgggcagcatatgaatcctgctctccaaaattctgccggatcccacgcagcaatgcaagcaggatatgccaggtcacacttcaaccctcagacacgctcattcatccccggcggtgctcctctcgggcgtcacccgaacaaaagccaacacccaatgcagccgtatggtaccatgcaacctggcgcccaacagcaatggcatgggtatccggaaccaagttccaaccggactatggactcaaccccggctatgaattccaaccgagtgcccaccggtcctcgagactcgatcgcgaaatggggcacaccatctcatcttccccccaaacccccgccttccgaagtcccttccgactttgatctaaaaagccgaaccgtcccggcctcggtcccagcaccaacatacagcaacaatggaatttccgccgtcagcaatggaccacttgtggtctctgggggcacaactgtctccaagccgaactaaagcttcacggttttggtcacctttctactaccatatgtgttgtatctgtgatccttgtgtctttggaagttgtggagatatgaacctttgtcccgtagtctataggctagattcatatgtccacatgcggcaactatcttccaaggcttgcatctgcaacagtacaatgcttggcgatccgggttcttgtgcatgtacctagtcgctcttagctagtcatgaacctgttcaacttatgtttcttctttctcgcctatttggaggacatagaattcgaaatggataccttccaaaacagtataagaatcacgactaggatgtcctatatgtaatgtagccaaatgattaaaaggagaatcgacttatgcgatgaacaaagtacagctcaaaacaagatggactccagtaattaagaaggtcttaagaggtaggggaggagaggagaggagagaggaagagatttctagagcaagcatgtactactacatacaagtggctcctataacacgtatacatgcctgaggccatctgataatctgtaaaataaagcaatattcaccacaatatacaaattaccaacgataagaggacgatggctcccaatgtcaagcactagtatatctagttaccttgcagggcctttgttccaatactattacatcggccataaacccttggaaattttttggaagcacagaagtctccttctctgatatactgcgtctcgaatcagcagcgcatgttaagccaatctcagacgaaatgccaaatagtagtagggtttattatgattatgtgatttacagaatagtatagtttcaattggttgaaagtgatatcacgtgtttctcttcctattttgtcgagttggttgaagagaagagattcaatcagtatgaaagctactagttcagagtacgaatagctattaccgaatatggtgcttacttctcgagttgcatatatgcctaatcaaactataaactatcagacaaagaaacagcacttgaacccccagcttttcacatccaagtctttagccctcaatatatacgttcaagttccctcaaatatgaaacccccatcagctcatggaatatattgattcgtaggcggcttatactgtggcctagactgacgggttccaaagatcgcagaaggaacaataataacaaccataagaacaacagccccaagagccgaaccaaatataatccactcacgtcgacgaggcctatgacgcctaaccgtccctatcacagactgtgactccggatcttgtttcccgtctgctgcagactgtcgcccactttcatctccctggcctctgtctgcggctccaactgcggcctcgacctgcttgtctgtgtgtttgtcgtcgacgtattgattgagttccaggttgtagtcccggtcgctgaactctagcgtgcagtcccgatcattgacttgcaaggtgcagttctcgttcatgctgtgttcgatggttggtcggggtgggtatggcactgcgacttctttgtctgtgtcgggatatggggggcttggagcattttgccggagcgggttgtgtgtttcgagtgacggtttttccatttcgagtattttctttggctatacttcttctgacctggtaggagatcagcaaatgatgaattctggaaagtacagttggggatatcggggtattacatacttcacacaagaaggttgcggtgtagtaaagatgggtatcgaattctggacaacagaattaagcactctatattatttggccggatcacaggtctcgctgggcatggaatattgtagaagagaattcgagactttgattatatcccaagactataagccagatgaataaatggccccttgggcaggtcggcttggcttgtaacagcattcgcttagatcatatgctagcgagcccaactattgataactttgcattgaattttattgtcccttgattgtaatttctgtgtgcaggctgcactagtctgttacgccgagctgcagctgatatatcagatctggtcaaccgccccaggaaatgagcgttgggagtctgcacggaattttggacattttccagaagtatttggtcattggtgactcaataaaacctcaatcggaagtctgattgccagaagcaagttttattttggttgaggatgctatggattctcaaatatatagttcttcaatttcctactagcattgttgacataactaccaaaccacccagaaactacttagtatcaatagcgatgcaataaaggcagttattatttgcggtgagccctctatttgatcgacattgcaggagatggcgttggtaaggctgttgacatcggtatgatttgaaatctgatcgccaggcagcacaatcggcaaaatgcctagttctgaacgtggatcatattgactggcggggccttcaatcgtaacatattgtccagcagttgatgattgatcttcagatctatataaaggcccgggataaaaatgtggcgacgtccctcccgcagcatgactcgatatctgcctttaccggaacccaataaaccaaagaagaagtgcgaataaagaggtatcaaaatcttttatacagaggctatgtcacatgcgcgagtgcaaacggagacgaaaatgccataatcaacaggaagaagacagaactcctggtaagaaaaacaagtaaagaacatagtcaacagcaacggagtcagcctcgaagacaagaggatgatgcatcgagaacgccgatcaaagcccagaagagaacatctcccaaacagatatcagagatcaatcacccccggccgaggattccgaaatagaacccccacaaaggagagcactccccacatctaatccctcgactcaacctccgcttcctgcttagcgagcttatcattctgcttcttggcaagactgagctgggaaatcgcccgctccaaaacgtcaacaccgtccttccggaactgcgtaaccttcttcacgttcaaccttgtgagagcgtgcacaagatcccggccctgctcgcgctcgcgagccacagtgcgcgccgtcatggcgaagcgcatgtccttcggcccatcgaccagctcgaggatagcggtgggagccttgacctggggcttaggctctcggacggcgtttttagtacccttcttgggggagaaatactcgttcttttcgcgaggttctatgcgtagcactcgtgtgtatccacctggacggtctgcgtagcgctcgcggaggggaccgaagagtttggggagcatttcatgtggtgtctagggaatgttagtgttgtcattgggttgcgggttcttttttttcctccaaaggatgatggatcggtaattgcagcaattcatcacaaattcagtaaatccatgaattctcgtgaccagaatgattcctttccgtattgaaatcggggtgggcttgttctctgggaattcaacatacgtagaaaatctccaatgcacgtcgccgactcgcttcggtgttcttcttgcccagggtaatcaacttctcggccaggcgctgggcctctttggccttgggccatgtcgtggtgattgattcatgctcgaagagggaggtcaccaggtttcggagcagggcctgtcgatgcgcggagtcgcggctcaagtggcggtatctgcttccaccgccggccatgatgagggctattaggcgaaagtaaacgaggcagatagagagagagcgggttattgaaagtagagtgggaatcacgaggtcaatggctcactaattacaggtgaaggagagccctggaggatgttcggcccagaagaattgtctcggccaatcggagcgcttccaccatctgtccgacttcagttttccgcgctcactctgtctggtcgacgacattcagcttttcgaatacatttcacctaaacctattgattgccgaggacagcataggctataatcaagaaatacttgtaccatttgtcgcattttcaaaccactcccacgaacaaatagacaatccggcgactccaagcaccacaacaaatatgggcttcttcactggatttgtacgatttaccctcgaatatataccagaaagcaggactaactacaattcacactcgaatagctcggtggctttgcctttacctcatccgttctctgcattaccatccaagtacaccgctcaacacgcatatcacaacggaatgccatccacgcgcaagtcgagcaaatagactggttgaactcctctgctggtgcctatgacaggcgcttcctaccagaagacgtgccaaggtggcggcgtgaagaattggaagcgcagagacaagcggagccgactatgaaggagatatttaagcatagatggaataaagaagtggaggccttgacaaggaaggcctatgagacaagatgggaggatgtgagacatgctgccgcggaaagctggaaggctgctgcacgagtggtgaaaagagaatgaaggatcatttctgaaaactatagcaaaggcttggctcgaaggaatccttagatgtattatcatgtccgcttgttttgggtttatttttgagcaccggagtttggatacccttgatttagttatgttataatttacatgcattagtattattatttccccgagggatattgtgaatgcgtccagcgcatcctcgtataggatagagatatcaatgcggtccggcaagactcggtgatagcccggatcaaccctgggacatgtacactcgccactgaagaataaaaaaatgcagcaaatgcagcgagggcgggactgcagctgaatcgactggaagactcagaagttcagcttgtattagttgatgacggtgcagttgtcgtgacactatctgagtcgctccagatatccttgctttcccgctcgacggtgcgcatggcctgagatacctcctccagtttagcaacgacatccaaaacgccctggttgacccggtcaaagtaccggtcattggcctcgcggcgctttcgcgcaagacggatgtctttctcggtctcgtcatccaacgtacggtacgataccgaaccttgacctgcgctagcttctgtcgctgtttcatcttcaatacctcgccgcgccaagctagcttttccactggcttcttcggcaccgctgtggccgggatccacaacttcatcgtctgcttcactacgtgcccaggcttgggcgagcttcaactgtttcatgcgtaaatcttccaatgcttcagagtgctttgcgccgaagacattctcgctcgtcacagcgctaagttccacttctgacaaagcgttctgcatctcctgccagatggcatcggatccgtcgacatcatgtttggaggcgcggcgtgatacaaagggtgataacaagctcgacttctcagtatttgcgctctcggctagccgagatgaccgattccgtttcaggggtgggggttggccagaggcagttgctaacggtgaggttgcaggtgggacgggtaaggagatattagaggtattgtgtgatggtgggccctggaaaagggctggaggaggcagacgttgagggtttggattcgtgggttttcttgacaaatccatcttcaacaaatgttagagagaacaacaaacattcggcatccgaatgaggttgatgatgcagctgataaggttatcgttatcggcgtgatgacataatcagatgtgggggctacgactgtctcgtgactcgcttagggctaagcgcacaaagtcacctgaggtgcatccaaagcgtgtggtaagggaaatccggaactcttcgacttttcgacaatcgaccctcagcccctttggccgacaacacccctcccagtcggtacgtattcgatatcctgctatttcccctacgttgttcgtggttttcggaaatcttttattcgtggcactgcgagatccttcgtcaacgatcgcacaaaaaatcggccttctccaaacatcgaacaccgaccgaaaatatccacaaccagcaaaacaaccgttacactcgacacgaggctaacatttttttccttgctcagttgaccgtcgaacacatactccgccaacatgggtaaaggacaaccccgtggtttgaacgccgcccgcaagctccaggcgcaccgcaaggatcagcgctgggctgatgaccacttcaagaagcgtcttctcggaaccgcctacaagtcctcccccttcggtggtgcttcccacgccaagggtatcgttctcgagaaggtcggtgttgaggccaagcagcccaactccgctattcgcaagtgtgtcaaggttcagctcattaagaacggcaagaaggtcgctgctttcggtgggttatcctcttccttactgctattgttggggcctacacgagttggaattacgacaagatggaaccaccaacacaaccaccacaaacagatgctaactggcatgttcttacagtccccaatgacggttgcttgaacttcatcgatgagaacgacgaggttctgctcgccggtttcggtcgcaagggtaaggccaagggtgatattcccggtgtccgtttcaaggtcgtcaaggtctccggtgtcggtctcgccgctctgtggaaggagaagaaggagaagccccgctcttaaacaactcgacgcgttctgttcgaaatcaaaaatgcagcgaccgggagccttggagtgtgggaacggtgccggacggaaagcccgcctcatcagcgccttgatttcatgagatattttctttttggggagtcccccggcgggcttgcgtccggaatgtggtggatccgcttatttgcgaattaaacacgattgatacaacctccaaaaagattatggcgccatgactttctatcactttcccgggtttctgaccttcctgtatactgttacttggttccttgatccttgctagagttgtctggtggagacgcaaagtaaagcgtagggtatggtgttgatgtgaacacagcattcatgagtgatggtctaaatcttcaatacatttgatctgtaccaacatgtatctatcccatgctctaggccttcaagcccatttacccgttgccgaacgtcatccacccgtgaacgtgtggagttgttcaatgatggcaatggccctagtagttatatatgtgtgtaccgtcttagtgtagctgctcgtggatatatatccaacctacgtgtagtgtggccactaggattccctcggtattaatctcgaataaactacaacgttagccccgttcctacatgagtcaggttatatcgacaaagatgcacatgaaggtctacgatccctttagtcttccgggaatcaaggattggaaagcttgaaggaccgagagaaaggtgcaaaaggaaaggtatgtaaaagaatcggattgattgccacttgtatgcttgcaggtcggctttatatgtgaatatatatcaatgttaccctcatggttcgtatggtctctacatctagtccaatcatagattaagatactctacactcctaccagtattcgatcggatctatatactaggcaaagctcaatcacataacgagataagcgagagtccaacatagcggctactcataaacattcgaaatcataaaacttagttccttttattcattactcctgcgtatcgatcgtcaaagtaaaccctcgggtatcgttcgggcaaatgtccctcaaaagatcttttattgattttcacgacctgtgacacaactgcctaaaccaactacagcttagaagctgatatcttctttgcggtagtggtctgagacaatgcggtacaggtatgatggagcatggccgccgctggggtaggaaaacaaggttagctttatggaatgagataagcgtgtgggatgggtgcttgaaacttacaggttagtaatgtaaagatcgacgagctctgcgggaacgtagtcatagatggggttttggacatcgattaggtcgacgagatcaccttcctcgtatgggaggaccttgctcgggtcaccgtattcaatgagtgagtcgaagtcgaatgggtagactgggctgagcttgtaaacaccgctcacgaccacgacgggggtctggtgaaccttggcggcacgcgcgatgacacgggtgccagccgcggcgacaaggccgccgttggcgaggacggagtgtgttccgagaatgaccttgttgactcgtgacatgagagcgaagacggcagagtctgggatgaggatgacggtgatgccgtgctcgatcagtggcttctggaaagcctccaagccgatgttgtcatcgtcagtgacagcgctaccgctgacagtggcgtgtgtgtcctcatggttattcggatacgactcggcatggatgacggtaaacttgcgcttcgcggcggccttaagcaggaatttttggacagtggtcgaggatgtgtgggtgaggatgatttcgttagagtgaatgtggtccagtgcataagcggcgatctgatcgtcgacctggccgagctcatcaatgatctcgccaataccctccagcacctcagctcgtacgtctttgcttggaccgtggccagggaggcgtccgtttggagaggaggatcccggggtgctgggaagtgagtgctcgggttcgggatgggacagaaggctgaacatagaggtcagaggggggcgagaggatctttcatcggaccggaaggagggcgagtcgcgatccaaaggcaatgatggatctatgaatctatgagtcactgcgttgatatttggaccaaaacttgggacccaccgtcataagcccggggtgtttggggctgactctctgagccaatatcgctaagggcgaactcagcgtcgcgatcgtcttccgcttcgtcgcgaataagacctaggacccggcgcacgatattgcccacaaccatctcgcgcggttgcgcagccattagtcgcctacccacactctgcacccgctcaataagctttgctgaatctgttgtgcggcatgcagagataacgcttcgtagcaaataggcggttgctgtagcacatgatcgcgaatggcggatttgacgtcgcttgagcaatctgattgaaatatactatgttagcgagtttgatcgtcggtaagagtagccgtcatgacaaggagtctggaaatacgtacgaaatcagagtctcaatagaggtatcaatcgggtttgtcttgaggcacttgaggaatgaccccaggcccggcgtcagggccaacgaggaagacggcatgaggaagtgggatgttgggaggaaatctacgcggtgtcagcgggggttcggcgacaggagtatgcagtgtcgggtaatagacataccaagtttcagatccagatcacaccgagtatgtaaatagaacgatgagcaagagattctcagattctcacacgaagagccagagagtgggagagacaaagaatgattttctgccgttcgatcttgtccgcttccccacactcattgatcctcgctctattgtctcggcttcggctttcttattggtgttttgccagtttttggatttcaattatttcatttccgtttttggattgctttttgtcggctttgaaactcgtggtataaaatcagattggagttgcggaagtacttccgaggcacgggtgacttggcgcattgaggttagaacaagcttacacctccttgagatccccctctttccttcagactgccatcacatccctacacactcatctcatggaccgctttaagtggctttgatgagtaactcacgatccgtttgccaatagatcgctgcgcccctgtctcccgtgacgccttgaggaagatgaactcactgaatatcctgtcctcgcgagtcattggccaatcttccagctcttcacgccacagatcgcagtcccaaagtgatagcaaacgtgcatctccaccgtcagacctctcgaaagtccggtcttatagcgaagataattttcggtcccttgaccccactgaaaagagctacaacgatagaccgctcgtggacgaagatggagaggaggatggtacatatgactcggacgagaagaccccgttactgcatgaaccccacaagaatggcacgctcactgctcgaagtacttggcgactgatttcccaacggtttttcgatgcgatcacggaaacgatcaagttcattttgtctacgtttgctgcacccggtgtgtatttggctcaatactttcagaccgacgatggccactactcgcttcttgcacctgtccggaaattgcgacgctccccatccgaccaagccatccggtcggctaaaggggccatccgggtagaaggtcggcgtcgtagtggctccacccggaagctccgacctcaaggctctcacgaatccattgtgtcaacaacgtcagagtccgacacagatcgacggtatactaaaaatctttcaagtgggaggaaccgacctaccaagacaaaaggccgcgatgcagattcaatcccagaaggggcggagcatgagcacactccccgtcggtctatacgaatcaagctccataatgaagaatctctcaagcggcagagacaacgaagatcccagagtgcagacctaggacatccaatgcccgagggtgtctctcgtgtccaaggggctgtccacctggacagcttaaagtccccaacctctcccaacatccaccgcataacaaagtacccacactctccaactccaccgcgcccactcctcccgtcacgagtaccttcatatactgcagctccccgcaatgccagacctccgcagaagaccttggtgcttgatctcgatgagaccctgatccactcgcttgccaagggtggccggatgtccagtggtcacatggtcgaggttaaactctcgatacccacgactgcttcattgtccccgggcggaccgcaaacgacactgggccctcagcatcccattctgtactacgttcataaacgaccacactgcgatgagttcctccgcaaggtcagcaagtggtataagctcgtcatcttcacagccagtgttcaagagtatgccgaccctgtcatcgactggctcgagcaggaacgaaagtattttcaaggccgcttataccgacagcattgcacatttcgtaacggggcatacatcaaggacctgagttctgtggaaccggatctaagcaaggtgatgattttggacaatagcccgatgagttatattttccacgaaggtaatttaggtttatctatttgggtgcgcttagactaataatcatcgctagataatgcgattccgattgaaggctggatcaacgaccctacggacaacggtctgctccacttgattcccatgcttgaagctctacaatatgtgacggatatccgggctttgttggcacttcgccgcggtgaaatcgagtcatgatcgttatccacatttgtgtccatgaatgtgcgcatctaggtgtataagggggggttttttttttctagaagcgatatgcaacctttaaacctgaaaacagaaaaaaaaaagatatcacggagcaatggagggaattggagaccgaccgacatgatcatgcaagcgcagttattcataatggcatccggcgtcttgtttgactaggaatggaaatccgtacatatgaccatgaactctcctatgaatgtaacacaacacataagaggatgatgtcctaaaatcccacggaaaccgccataaccttaccccctctggtactcgtgtcatcaacaggaagcttcgtcccccctccagtagtgatataaagaacattacgatatctctgtgtccgcccaaaagccgccgatgtagcagtcatcaagtccattgagcccttcaaacccgcgatcaactcatgatatctattaggaaaggccctaataaccacatcatcaacaagacccgccaaatacccaaccccatgcaggccaatagcgaagtcatcagcaagtatatcatggctgataacctcgtaaggccccaaagcacgaccggtatgtgtatcaatttgaacacgacagaaaatatgctccgggctgttgctgtagtacatatactcgtttactatcttcaacccgttaacctcaagcaacaaacccatgtcatgatttgcggccattgtttcgtgttggtggatcactccgtacgtgccggtgcggatatcgagacgccatataaggccgagttgggagtcggttatggcgactgcttttccttcgtttagagcagctatgccattcaaatagtcagcggggagttttgcgatgagaattggctcggcgcatttctgtggtgtttgagatcgaccgtccagactgagttggatgcaatgactgcatagatatctggtgagagctccgtgataccatctgcgtcttcggcgccgtcaaaatggtggaccaaattggctgagctggggcctgatggaattgaagggtcaatttcccagagttctgctgtgctcagtactgcgactaggaggttgccgtcgggtcggactgcgatattctcgacccaggtcccgttaggggatctgtggatttcgcggagattgggagagtgggcgaggcatagagtgtagatgaaggtaagcagtaataatatggaacctaaaagattagccatatgtggaaggtgtgacacaaggatctcaaataaccaagtatatgggaatcattgccatatataggaagtgccagtttcccatttcgcaactcgaattaggtaggtttcccggaaaccgtggccatgtatgtagttaactagttacaaagtggtgcttggtaatatgctcttggctgcattgggctcagatggtcatacagcacgattggtaatatgctcttggctaaattgctgacagcagggcgcggagtttaccaccggcactccactggcactccactgcagcctgaatcagaatagtaagtctaggtatcgagtagtcctaggcctagatataagcgtcgatatctgacatgcaaagaaacagcacgtcgcagaaggggtcgttgggtgccaagttaaagtcccagcgtggcaggctggggcttttgctgagacttctgccttgacaagaccttttccttctctctcttggtctcctttgatggagtaaaaaaatatagatgtaagaacccaaagggaaaaacgaaccgtctatcactgtctgactgtattcggattttagtttgttaatttatgctttttccgggtgcctaccgagtgggtcacaactcacaaatataattggtgggccagcctgagctgccaatagccaaaagttaaaaagtcaagtcgggacccagtcaaagtcatgacgtacaataagcagcctacatgatgctcgaacctaatagtacatagatactgagcacacctctagagtcaggcttcttggcgcctaaggctgcagtcttgggggtttgaaaattgcagatggaagagccgtggacgaataatatctatatctcaatctctcgtcattctaggcgcgaatgacaattacaacaggtgatcagcaaaggatttgtctgtagtgcgtttttggtaactaagccatgcaccacgcagaatttcaactctcctctcctgctgtgacttaagcgaccccgtttctgtaaggttacatcttactatgcacaaatccctatggtgcatctcgtttgtaccttgggtactgctggaaaattgtgctaaatttgataacacgagttaagagacgaaaagccttctccattttcttcagttgacataacgacaatgtcaattcgcaggctgtccgcgtaccaacgtcatgccagagaccaaaaattgttgcgattgaatgagaatggcacgtttcaaatatcagtttttagtgacttgcatttcgctgaaggtatgctgacagactcttaccgttgacttgagatagtaactatgtaaagatgatatagcggacaacaagaccgcaggggtcatgaaatccgttctttcttcggagaaagtgcaactcgtggtactcaatggagatttaatctctggtgaggccacccaaaagtctaactcgagtctttacgttgatcgggttgttgcacctctactcgaccgtggtataccatgggcatccacctatgggaatcatgacagcgaggtgaatcttgatccagaagagatctttcgtcaagagacaaaatatcaaaacagcctaaccgagagaagggttctggaccccgctgccggcatcacgaattattacctgccaatatttccacatgaggcttcgaatgacactatcccagtatttatcttgtggttttttgacagccaaggtggtcattatgcattgacagaggatggggatggcgaatcaaccacgagacagaattgggtagatgatacagtaagtatcaccagggctctcacatgttcccatgcttgatccaaaaagtcgaatgcttggtcaatggacttggtgtcgagctttcacatactgacttgttgcaggtcattcaatggtttataaaagccaatgcaaacctaacgtccacctacgggcgaacaatcccatctctagccttcgtccatattccagttcatgcaatgcgcgccttccaaaaatccggcgtcagcccggtcagggaaccaggaatcaacggagaaagagtccagcaacaaggctacgatgccgagtccggctaccattctcaagacttcccatttataagtgctctgttaaacaccacggggttagcagcaactttcagtggacatgaccacgataatgactggtaagaaccatactgtgctatacattctcttctcaggttgaagtcaaaacgcaaaaacgcctcatttgactaataataatccttttcataggtgcttcaagtgggatactaagctaaatggcctcaatgtgacgggaaatggcatgaacatgtgctacggccggcatacgggatatggagggtatggcgactgggcgcgtggcggaaggcaggttttgttggataagcgatcgcttggggatgatatacagacttggattcggatggaagatgggtcaatttcaggcgatgttcatctcaatgcgacgtatggccaagatcaatatgggctggtgcagaggagtttcagcgggcaaaatggtggtctttctccacacttaaatgttctctatttgtggatttgtatttactgggcttatatgcagttgaactgatggtcaatggttcggaggactctataaatctgttgagttgggggactggtcatggttggctcttaggggatatgcgagcgtgtacaatttgttggagcgacacagttcaccttgccctgaggactagcaaggcctgaaaacatcagctgggagtataatggagaaaaaagaagattgtagcaaagctgtgaaatctagaggcagctattgacgtcgggatcgaatgcttatttatcattgggtgttttgtgctgtacgaagtacatatgtatcggataatgcctgatactctcgagacctttcctttgcgttttagtgctcaccccttgccgctttttggtcactgagtaaaactgagcacgtccctgagtatcctgaccgacttgatcacaggccattacgtaatcaactgatctgctcactgagcatcacctgatcatcccgtgaatacacggcgaccttcgtgctcctccgtactgtttttggttggagagctgagtaagtgtcctttgaagtatttggcgcatattttgttgaagtcatccagaagacattttactactggctcacaatctgcagaattggttctatttttctgtggacgtctctaccgctactgtataatgaaataactatttggctggttcaatgccttggtgacattgtagcttcctaaaaaagtatctcttttctgaattgactcactcgtctccaccatcagcccccattgccgccaacatctcttccgggcccgcagctaagaacatatgatgggtcatccagtgacctttctgaattgttgccaccgcgcgcggccgcatcgcctcctcgtatgctaatgttgccgactccaggttatcgatgccatgagaaatgatgtgcctcgccagatcgacgctatcatgcatagcattgttgactccatctccagttgggactctatagacaaagaacaaaagtcagaggtaaactctttcccgtggcgatccaagaagaaaaaggcacagtttagtatgcacttacgtcaaatgtacagcatcaccaacaagtgttactcccgaaacatgattccaggacgggattgcatcctcggccatggtgtataatggccatgagcgaaacttgccatcgcatgaccgcacgaagtctgtcaggtcataatcccagcctgcgaaatattcttgcagcacggtattccatagggccgatgcactcgcgaggatggaaccttcaggtatacttttctcagaaagccttagacccacagaaacgtggtacgacccatcaccgaggtaatataggaatatttgccgctctttgccaaaggccagataatttcccttccctgcctttgaggcagccaacgggtagattgggttgtcgggcttgatataagaagaaaagaaatggataccagaatactgcggctcggagggcataacctatgacaatggtattatcagccaggaatccgacacctccactgaagccatatcgaaattggagactttactcactgtcgctcgaatcttagaccaggcgccatctgcgccaaccaccagacgaaaaccagatctagatggctggttctcgaaatgagtcgtgacagatccattgtcaactctctcaatgcgttgtaccttgtgatcccaaagaatcctagacgccggaactgagcttagaagtaggtctcgcagatcctttcgatcgatctctggctcttctgtgtctccctcgcgggaatgagaaacatggaccttcccttgagaatcgactatagtgagtggaacaccaaagcgcgcaagggattgaaatcttggaaataagccggcttcgaggagagcggcctggccagtggtagggtgaagatcgagggtaccaccgctctgatgttcattcgcccacgtggcagagacatctcgttcaaagacaacatacggtatttcagcgacctccaagagccgtgcgagagtaagacctgccgggccagcgccgacgatggcgatgggtgactgtgactgcgtcatgttatgagtgagactcgaaaacaaagaacgaaagtttcgatgaagatgcagacgagaggatgagagatgacatacttatagatttattctacgtcagttaaatgccggaacttgtgatgtcggatgttagaacacttcggaagttactgtaaggtgttgcgtttcggagtttaagtccacggctcggaggttacggacccactctaaattcactttacttattcgcgaacttccgtaacctccgactttcctaacgcccgggattatttaccttcagttacgtccgacatcaaaatggctacaagccagggcgatgaggatactgccctctccaaatatgcttgcgactcatgcatatcaagcaaggtaagctccgcgttttcacttacttccgcgatcgagagatggaaacaaactaaactacctccgcagattacttgctcccgtgaacggaatagttgcgaacgctgcacgaagagaggaattccttgtatctactcgcgtgtaggcatcattcgtcgtgctagaaaacgcaagcacgagacacagcaggctagcggtgcaatcgcaactcctcggcccgcgcctgggtctgatgatggctcggcttccaagatcctgcgaagcgacggtcgcccacagtcatatcttgcctctgatattgaattgaccgaagaaagcttaggcggttctaaaagcccgggtcagcgaggtccattcaacgcgctgctgatgctgaacgaagccagtacagccacgactgttaacaacgagccaactgtgctggacagtgcgaggtctggaaagacaacacgactttcattcaagaagcactctatagaatggtcgaaaagtatggagttcacgaaaaccgtccactgcgcatatggttccagctgctaatgatgccattagtttttgagaacgccttgcgagataaagaacctttgcttagtccggcacctcctgaagtggtacgctctctgaaagcgtctcgcccagatgagattcaagaaaaagcctggttagtgatgtactactgcattatattgagagtcaccgacgctgtacatctcaaaagccagctgcgacaagagctctgggcctcactcggaaatattagcgtcctgatgaaaccgagcgacgcgaacatccaggctattctcatggttattggtctcgtaccggacttgatagacccctcattatgctggatgctctctacaagcgcctgcaggatgttacaagccctgggtgttacccacagaaggatcgacgctcagaatcgggaacaacggcggctgagattctggcagcttaatctcgttgacaaggcgcttgctgtcatattcggtcgatctccaattttccctcagaggatgggcattgaggttggtcttccgacattggagcagatccgaccatctacgcagcaccggacgtcagatggcagtaaagggtattttgcatcgcacctcatgtatcagaaatttctgctctcaaaggttatggcagatatctggcagtgcctctacggtgaaatagagagccaagatctcgaaatagagtcggtcattgctaatctcgaatcttggtatgaacaggcacacaaggtatgtctcaatcctgcagggtttgccttcaaatgcagttaatgacactttaacccgttgcagactcttgaagctactgcgatatctgaaaagccattttgcaatgcacaaaatgccaagtcgatagacatcggtcttcgcagccaggatttccattacttttatctgaagatccttctgtttcgaaaatccccaccccggcgctcccagtgcatcactagctctaaggaattgctcaacctgcttctacatctatccccagaatcagacgagccatatcacccttttctctggcaacttctatactctccattcactgcatttttgttgttatttcgtgacattttactcaaccccggccgtgaacctaaggacaatcaagaagctctggctgctatggagaatcttccggagttcctggaaaagatggcctcgcggaatccccttgccacaaggctgagggaagtttcaagagtgctcattggccatgcggagtctgtcttgactccaagtggacaatctcgagctggatcagatggtctagtggcagaatcgactttcacatcgagtgagacagcaagttcgtttgacatggatctattgtgcaaccaaaccacagatgcggcaaaaaatcctttctgtgacttaaaaacagatgatatattcgaatcactcactcaagattttgagggaaatggactatttgactggatgacttggctgggtgagacgtgatgatatcatgcggatacaatgaaggccggaagacccggcaaagatgcgctttcgcaaagatagctctatgcagaatcacggtcctggttttctttcgtggacgctaccaggtcgacggcgctcaaattgagagttcaggcctacgggaaagtggtcatcgaaccggctgtcaacttaagccatacaccggcagctaccaaaaacagactcgttccgcaaaggtcatatataacacccacttagagtaaatatggcccatgagaaagattgagtgcgctggaccctatgagagcaacagaagggcagtacagcagcgagcgtggattgagctagaccgccaggggcaacgaccccgccttcagacgcccctgtctagaacattctgttcagatttatagtatttaacagacgccttgaacctaaaacatcacaagacacaatactgccaagaagcgaccgtttcagcgtaaccaaatacagattagcgtatactcgggtacgggccgagaaacaaagtcagtatgtctaaggggtaatctgttttcgaaatcgactgtacattgcagagaggatcgactgtagcatatccgggtatcaggcttttgatcgactggacttgtataagactgtatatttggtcgattgtaaaccagattgcgagcggcactaatcgaacgaaaatgacgggacgggccgagacatgaacccctgaaccgcccgaccgcgacgttctactagaccgcctaataattatgcccaggagtaaaaactcgacattgaacaaagtaacgcgcgttcttagctgaagaagaagacctagggcaagtgggtagcctaacatgaagcggtagcctcggaatcattaacagagagcgaggacccgaacgtgttagagctgttaaaggaacttgtcaaacttaggaaggagattagatagcgagatgaatcatataaggaagagctttgaaaggtcaaagaagagtttgccgcccttaaagaacagtttaatactgcccttatagaagtttgacacaagctatagaccctagcagatagacccgcgatcccgtaaccctacctcgagctatattcttagaataaccacgataagatcctatatatgtgtaaaggtatacgttatgcaggtgtaaggcctgtcaaccgggtaagatacaaagggctttgtggagggaacacaatgtatnnnnnnnnnnnnnnnnnnnnnnnnnngcaggtgtaaggcctgtcaaccgggtaagatacaaagggctttgtggagggaacataatgtattgatgatgtgccaagactaattcttgccagtctcggggtcccctgggggtcccaaactataaggaaatctatctgcctatgttcatgtgacgaacctcctttccttagagaagaatcggaggtaaaatgttcttgtaatcggtatattctgaccttctactgatggtatagattttaaaattggattattgaattagaaaagtcacaatttccggaatgtttttattgtttagggcccattgggcccccactagcctacctcaattcaggaaatatatgtgccacaatgaagaaattgagccattgaatttaaaattgcggaattcatacctgtaaggataaagctcatcatactggttgcattgatgtagcaagcaggctggttagttgacaatttaaagacagcatattatccacgagcttatactacatcgtgcttttgatattctacctgacttgtctgtaccacatatttgtttgtggctctcattagaatatatagcgcgtggatgagcatagcatgcatgttcattttccagactatgagcgagagcaattccatgtgagggcagtagcaatgctatcaacgaactaactatcacagtataaacgacccggtgggggctaatcccttctgggtatagtctgcagtaagctgagtgcatcagtgttactcactgattggacactgggcatcactgagtaatccgggagcatccaatgagcactcactgagcacttactgagcaacagtcattctacacgtgactgaactaagcatgatcactgatctgagtccgtactgacatctactcagtgagcctgagtctgagcaccctcataaaagcggcggcagatcaaataggaaagccccacacgccagggaaaatccggtacatatagttacaatatgtatgtacctgtgccttggctgttgagagcgaaccatatagatgttacttagaaaggggtgttgtctcagtcataggtttcagtcgcatagctcaaagactacgccggagacaataatagtgattcggtagttacttttcacaaacattaactctagcctatataaatctgtaagttgtggtcgcttatttccgtttgcctcggttttgcgggggagtttacgatgactcgcatgtcaagatccttgattccttggcgagtctcaaaagacaggtgggttacgcagaaaacagtctatgtagatgaccaaacccatgtgaaacccctggttttttcgaaacacagcccattcgatcgtcaaaagaagaaaactggctctcccgcctctgacgtcagagacccctgggcggccccactctttctgccccgggtccacggttgtgaattaccaaacgtccgaaaacggaaacattctagggcgtgaagagatcgcaatcaaatgaggttgaagaacaatatctcaggctaagatatcaatcacctaccttagtagctagggactctcatacataagctggcgtgaaacatatcttgtaatatgtgcgtaaatcattgaatctgaaagccaagaagcctaggttccttggttggatccgtcgaatagcttgtcttgccctctttacacgcgttgtatggcttggcatatgcatggtgaccgagaaagtggggaattaaataagccctagcccatccgaaaacaaagaccctatattattcgacatcatctgtcgctgatctgttgctgatctgtcgctttcactcactttatcccgtaataatatgataaattgacctgctaatgcttatcctacccagccatgaactgcttagttgactgcacgcatacaaacgacatcgggctatactcggctcagccagtggcgaacgatatgatagatctgctagttgatcgtcggtgaggtctttgcgaaaccaaccagcaaaatcttgctaccccacagaaaagtggataaggccctgaatcctatttttaacatggaacttttaggctgggggtcttctgctcatacatcaattattgcgccgcatccccaacccccaacctcctttgacaagcaaggtctcgccccatttttacttcgaatcgcgagcacttctcattttagattgataccatctatgattgatctaggccgaaatgcacttgtccggaacatggtctatccttaacggtctcatcacaacactcctcttttcaacgttaacgcctgcgatcgaattagacatcagcaataaacgtacgtcacggatagtcgaagctattttccgataaaagttgttatgggactgactccgcaatcattggacagaatcaatcaaagatgccgcaagtacgagtgcttactccatgttgggatggtatgccggcaacgaaactggacaaattcctggctctttccccgaaaaatggtgggaagggtctgctctttttcttgcgttgcttcaatactggcacttcaccggtgacacgacctataactctttgacgagccaaggactggagtggcaatcgggtgataagggtgactatatgcccagcaactatagtagctacctggtgagcaccatacatcaatttcgaattctcgcgacgaataaccagttctctgactattctcgaatccctagggaaatgacgaccaaatgttctggggtctcgcagctatgatggccgccgagctgaaattccctgatgtcccgggccaattctcgtggctttcgctcgcacaaggtgtatttaatacccaaaccgctcgatgggatacaacaacatgtggtggtggcctgcgttggcagatattcccgtaccaggacggatacaccatgaagaactccgtatcaaacggcggtctgttccagcttgctgcgcgcctcgcccgttacaccaatcaagccaaatactcaaaatgggccgagaagatctgggactggtctacttcctcaccgctagtgaacaacaagacctggaatgttgccgactccacgcaaatggcaaatgactgcgccgatgttggtaactaccagtggagctacaactacggtacatacctgatgggtgctgcctacatgtataactatgtgagtggaacctcgatactcgctatttacccattacatgcgcccaaatcttctatttgcagacattaacattccacctgtacagacaaatggagatgaaaagtggaagaccccagtagacggcctcctcggcaaaaccctaaaaaccttcttcccgaccggcgacatcttcgaagacacaacctgtgaacccaccaagaagtgcaatttcaacgagatcctcttcaagggcctcacctcatcatggcttgcattcaccgcactcctagtccccgatactgcagcgcagatcaaacccaaactcgcgagttccgcacaagctgccgcgaagtcctgcacgggaaacaacaacaacacgtgcggcatcacttggtatcaaaacaagtgggacgggacaactggaatggagcaagagatcagcgcaacgaatgtctttcttgcaaacatgattaactttgacaccggcacgtttgggcccgtcacttccaagactggcggaaacagcagcagtgaccctaatgcgggtgaagggaaaggaggaggggatgacgttaaggagaagcctactacgagtggggataaggccggtgccagtattctgaccttgatctttgtctttacttgggctggaggcatggtttggatgatgctgggtgcttaatttggcggtatatttatttaattggcattttttcttagaggactcggagttctgaaggggacttgataatgtttgtacataccatctcgaaatcttttactcacctaaagcaaaataggatacccacgggtggatagcgtttggaaacggaggaatgaacttgaagacctagagtatggaatagatgattatactataatacccaggcatagagaactacaaaacatcacaggaagccgaattatgtagacagatagatcgtagatttacctagatcacatcaagtccatgaatggctcacaccaacaccatatctcttctttctctagctagctcaattcatggtttcctttcccttgtgcttctgatacatacccattccccgaagctcccatcgcaccgaaagacaaactttggtctctgatgagtgacgccatatcactatatctatctccccaacacccctctattacggcaccaccagcaagaccatcaactgaagggtattgctgagatgcaaagagagcatctactcgttcttcgtactcattgttctccgccacggatctaaatggcccaggggacttatagggccagtggccggtcattatcgtgtaaaagaccgacccgagactgaatatgtcaacagcctctgttgacacccatggtttggatggattgaaaaatcccgggtcggggagatgcccaccatctatatcaccaccatttgtcgatcctccaaagtcacatagtaggagattgagcttactcttggaatcagagtgtaatagaaaattgtccggtcgtaaatcggaatgaatgactcccttctggtggatatagtatacggcttctgctgcttgacaacaccacttcaaacgaagatttagatcgatatcgtcattatgctggtcaatgtaatcttgtaggttaccatcgctagcttcgtcaaagagtaatccacgcggttcctcggaggtaccgatatagctgcaataaaaatgttattaatatgtactccgtacattagatcgcgtcgtattcggctgacataccgtactatgctagggtgtgtccctaagatatcgaaaagtcgctcttcgacctcgaaactgtgtttgatatccttgacaaaggaggtagcgtctgccgtatcggaatgccaccatgaatatctagggcatttgacaatgacccccggttttagtcttacgatcaatgaagtcgaaccatgggtcaaggctttaccgacagaaggttcatagatgaccggattgcctattcgacctggcaaaatagcttgattttcttcactttctcccaaggcctggtttttggcgacagttggagaatcattttcggatatagggcgtccagaaaagaactcgtcaaccttacctgccaatccccagctgattttgtacccatttgcgccagcaccgtagcaagatatcaggggaagagggttccctggtttcaagacaaaatgaagtccaccatgtctcatagggcgccgagcaacgtagacttgtttcacatcaaacccattggtcgcagccagtccatctgcctgctcgtcaaccatctcggggcatagaattctcacccttttaagaatgacttcagtcgaagcatcgtcgatatcctcagacctaacaagtgttagcgtcactccaacctcgggaataattcaaaacataccagttattaggctctttcgtgccaccgataacagtcccaccacccagaggccggggtatgataaccgtagaggaaccatcactccaatgatgactgatagttctgtcaccgtgattcgagacgatgatgaactgaccccgcgaggggaaagagtcaggatcattaaaccccctcccacttgcatcaacaacagccgaaacgtgatcaatctcatcctgggatgtattctcccgatatacagacacaacctgttctaggtccgtcaaatttgcgcgaataaagcgagtcccttgcgcctctgcgcgtgtctgtaaccacttcaaataaaccggcgagttcaggacccaactgcggtatgaaacacctagctggatagatggatattgaggggggtattgggtagggtcgagaatctggaagtccggccatgtagtgtagccattttcttctgccaggaacgaggtcgcgtcggctgtatcgaaatattcgactgcgggaataaaatccacccccgcttccgggtgatgtttcgcgatcttctcgaattcttggtaggtttgtcgcatccaggcctgttctcttcgttcctcttcggtttttgcgggggtggggcggaagtgtgcccctgcccatggggaggcgtagtcaatgccaacgtcaccgggtaactctctcgcgatgacggtgattttcaagtattgggatagtttgactgcgatgctgagaccgataacaccggctctgttgaattgcagttagtaggcagaaaaaggaaagtagacttggctctcacccgacgatgataacatggccttgactcatgttgattgttctttgtctttacggtagtccaaggtctaatgattgttttatgaatgaatctatgcaattgtccaggttcagatgttgcgaaatgagtcatctaaattcttcagggccgacacggccgcgggggcaagtcacaccgaacagtcatattgcggaatttgtggctgtcgaggggcaatcgaatcaaaccagaatggccataaaccacctagacattgttgtataagagaatttgttgtggactattttatggtaacttcggctcagcagctgtgtgacatagtttaaaaagcacacatagtagatatgagggaaaaatgtacaatgatctcctcaaagatacatcgccattgcaataaattcaatttgtgacttccacgcgttaagcgcgacgcgaaagcggtgtggatttgaatggattcgccatcgaagccccaaattcacccccgcatcgcagctcccacgtctagatatggtcgcaattacacagacagacagccagcccgacgctgtagacgaggaggcaaattatgtaaacgagactacagctctcctagggaccagcaagaccaagtatgctgacgcgcgcacgtcagacacactggacagttcgccagggccagatagcgacagtgacgacgaggaagagcccttgcccaagttgcagattctgctactctgctatgcgcgcgtagtcgagcccctggccttcttctccatcttcccctatgtcagccaaatggtacaggacaacgggggcgtggcagacacggacgtcggcttctacagcggactcatcgagtcaatgttctccctaacgcaggctattgtcatgatattctggggccgagcagccgaccacctcggacgcaagcccgtcctggtatcctccttgttcggcgtgaccgtggctacaggcctttttggtctagcaaagaccataccgcagatgatcatgtttagatgtcttgctggagtttttgctgggaccatcgtcaccatccgcacaatggtggccgagcacagcacgcccagtacgcaggcccgggcgttcagctggttcgccttcagtgggaacttgggcatcttcctggggcctttattgggcggtgcacttgctgacccagtacgacagtaccctggagttttcggaaatatcggcttcttcgaaaaatatccctacgtgctttcgagcttcgtggtggcgttgatcggggccaccgctgctgtgtctagcgcctgctttgttgaagagacgttgaagaaggagccggttgtcgtggaccgcgatggcggggaggcgacatccgatgcgctgaccgagagcggtgacctatcgacattgcagcttctcaaatccccaggggtgggtatggtcctatacacgtacggccatatcatggtcctcgccttcgcttacacggccatcattcctgtcttttggttcacccccgtaaacctcggagggtacgactttacccctctgcaaatttcattgatgatgggtctaaacggcgcctcacaggctgcatggctcctcctggtgttccctccattgcaaaggaagatagggtcgaacggagtgatacgtctctgcgctttggcttatccgctattcttcctactctgccctcttggcaacgtacttttgcgggtgggcacagatggatccgttaaagccttttggattctcttgccgctcgggctggcgattggatgcggagtcagcatgagcttcacggcgatccagctcgttctgaacgacgtctcaccctcgccgagggtattaggcacgctgaacgcactggccctgactggttccagtgcgctgagggccttctgtcctgccctctttaccagcctcttcgctctgggggcgagaacacagctagctggaggccatgcgatctggatactcctgctcatgcttgcttcagggttatctgtcacagcaaaatatctaccagagccccgggccacgggcaagcaccggaacagccaggcaaggtgaggatggttcgattagctgaattcacagcacgatcaagacttcccagcgcgcacctttggaggaaagccgctttttcgcataggatctaaaatttgcaattgtctccaaaatttgtcatgctcgatgatgcctgtttatacagagaaaattcatatgtacgcattatttcttttaccgattcgtaccccgtacatacaacatattagagtatatccttttaaaaagttaaatttcgacaaagggattatttatgaaagatccaaaggaacatcagtgtgttatctaacgtcttttaactatatcatctagacctaagtcaaccggatgcagctcaccactaccagatggtggtgtttcgtctcagcttgaatataatcgcgagcaccacttttattacgcttggacctcggtactacagtctctattaaacttttggaacttcctaatcatggtctgatctagaagggtttcaatgtcactattcgatgcttgccctcgataatgaattgggaaagggacatctcattctatcggtcaagaacccatcaaattattcatccatatgttatatgtcttctgttccgcaaatccttttatgttgtttgttagctgttgtgccatgtctcggaaatctcaatggttttcttggcatcgaggaccttgagagggtagggctgggcagggcttggcgggcttggcagtcactcgcataaaggtttactgagcgatatattctccatccaatcgctttttttaattccccaattccgtcaaaatgctgcgtgaagcattttttatattcatatgcgtggcatgggcgggatttgctattcatctctcgccgtggttgaaggttagatcaatatcctggaactatactactgaggactaacgtcgtgtagggcatctcccacggagttgaagcttacaatgctactgcatttaattacccagtgccattgtctacacatgatgaagagcacacgcgtctactgcagaatcttcagcgatctagtgggaaatgggactctacccaccctcgacatcggttgttaactgccctacatggatatacccgctacaaagacaaaaacctggcggaggtgactcgatggaggaatctttacaaaaatgtcccaaagcagcagagaatagtacgatatttctttcctttcctcttgtttttttctttgcgggtgttaagtgggtttggctaactggcctagttgctcgaatcaaccatccactacacgcgtaaactcaacacaatggaacatcttcttgagacaaacaacgaactcgccagatctattgttgaccacggcctttggttctacaatatcagtcaatccgagctggacgaattcgtcgaagaaagcgagagtcagcagcggtccgctgataagactagcgtctcccagggaatgaagcattttgtgcgtgactgggcagatgagggccaagaagaacgtcaacaatcctttgggtgtatcttgaaatcgctcgcccagacaccacgggcgaacgaaagacccttgcgagtgctgttgcctggggcgggattgggaagactggcgcatgaggttgacaatcttggaggtgagtacataattttctatctggggaagtctcattggctgattggagattaggctttgaggtcaccatgaatgaatggtcaacatacatgaatctggcataccgttatgtgtccagtcgctcagcccctaacagtgaatcattccacccatatatcgactggtggtctcatcacacgacgaccgatgatctccagcgctccgttacatttccaaaccaagttattcgcccatcatctgtcttgctcatagagggagatttcactacggtattcgaagaacacacaggccaatacgacataatcgtgaccttgttttttattgataccgcacggaacctagtatcttaccttgagaccatccacagacttcttcgtcctggtggccgttgggtgaacctaggtcctttactgtatggtaccgctccatttgtacagttatcactagacgagattgtggccgtgagtgagggcgtgggattcgagtttcaggaaacagatcccacaattggaaataccacgttgcctgacttgcgagtgcgaggcttggaggtggcatatggtcgaaatgagcgcgggttgaataaaaatgcatatcaggcgcagtattgggaggctgttaagctctaggataggaatgaaacccatttcatatttgctgcgttctattacactctacaacatagcaaagtagctgtttaataccagaatatcatctgaattcaacctggttggttcaaaaacgggaggcatcatacgggatagggccagttaccaaccccctgtgttgacacacaatatctcgtgagttatccacctaatttaaccgatgaatgaattcgtttgccatatccaatatagtgatgccccttttgcctcagcccacattgactagctagcacagacagcatctcggttacaaggtttccggtgatgccgggaccatagctcagcaatatcgaccgatagtaaaggattgtcacgttaagcgaatggagtattctggactctaaatttacactaaaaacatggtatttttcctcggacaataaaagcatcaacacttggcaagctgggatcggcagggactgtatgctctgaccttccaagacggccaatgatacacccaagaaaagcaaagcgctcattaataaagcattactacccacatgcaccaccatccactggaaggccaattatatgttcaataccatgagacatcccctccgctgccaaggctatttgagaacctttggggcaccaagacttccacttgtcttggcctcgcaaaatactgctctctcggcggaatggcaggtataaagggtgcagaccctgtgcagcggatctctgaattcgcaaccttcgccatcgtcattacattgtgtacagccctcaaatcacctcgccacaatgagattctctatctttttcattgcgatgttgacttcggtcacatccgcggcctctactcaggaccccggtccatctcctactgcctcaattggctgtgagcctcacggagaccactggtttgttctaccccatcgtatgatgtctattacttgagggcacttattaacactcttctatataggcactgtgatggccctgcctcaacagccgtctcctcggccatctcctcggttacatcaacggcaagcgaggtcgaagcgagcactacttctgcggaagcttctccggcaagccccagtcctaccgagtctattggttgcgagccgcatggcgaccactggcactgtgatggaccggccgagacgtctagcacctccgctagcacctctacgggtacttccaccagtgagtcggctagtgcttccgacagtacttccgacagtgcttccgcgagtgcctccgcgagtgcctccgcgagtgcttctgccagcgctggaaatgaggacagcggtactggagcaattggagtgcaaatttccctgcttgttggattgtcgcttgttgctgctggtctgaatgtttgagtttcgatgactgtctgtgactgtctgtgtgtgtgtgtgtgtgcgagtttgttgctattgtcaaggcgaccctctcaaagtacagtgattttggaatcaatgcattacctatgtaaccctcgaatgttaaaaggatttatataagccgcgtatccctagttaactagttagttagtcatagtcaactagcgaactacctagctaaggcccttttcatggcaaaatctgcggtgattggcagttggaggtctatagggcgggagatgtcgaaattcttagtttgtcgccagatgagatttttgttagaagctaggttctacattactagataaaaaaataatgtagcgcgaaacgaacagtagctcaaggacaagaaggggaaaatgggcgaaatgttagacggtatggaacctagtagtacatcaccctacactaacagcatatcaaccatcaggattgacatattttcgagtgaatattggttcagtacattagttcattgttgtgatcaaggtgtcaggcttttctaatgctttttttttgcaacaaatgatgctacgacctcccctataacctacgcttattcgatactagtagaccatatattgtaaactagacgatacacgaccaatcaaaaatacgagtgaagcgggtcgcaactgatgacagccacagctatcaaaggagttgctacgggtagcaatgtgaattgagagaaagacaagtgaaagacttcgatggaggaatttcttttttttttgctacgtagaatattgaatacagaacgagtgtgggaagatccaggatgagtaaagtaagtatgtatagccagttcgagggtgatgtaaacaagacggaaaaggaaaggtacagctggattcccggagaaggagaacgatgaaaagaacagtcggaaaagaataaatggacttaacctccctaaggttccagccctagatcctatcctaatccagtgacccagaaaatcagaaattgaaagttggtttggttggcttgtaaaaaaaaacgagagcttcgtgagtagtaggttacatttaacaaagaacaagaccaataatccagaacaggagagggaataaatcctgcattgtacgctgcaagaggggaagagggagagagatccaggtacagtaagaggcagagtagaggtaacagcaatagactctctattcctgtccaaagccaagcgtttcctccaccgcaatagacattttgtgctcgagagcatcgtgcgtcttgtaaggagggagatcaagacggttgaagctgtgttgaaataaggttagctatgatagaccagatataaaaccaggatcggatacataccaagtatgcgacttaggcagcgcagcaggatcgccagacttctcgatggtgaaccgtctgggaccatcggatccctgcagatccttaaatccgttgacaggaatacgcgaggtaccagtcgtgaactggagaagacgagacttctgctcggcatcccaggtgcggacaatcttccagaaattctggatgacctcgtcctgctcctggtagccgcggtaatcggtgtgcttcttccagtcttcgacgtcgatgtcggcgataccaccgatgagcaactcgagttcgcgctcgtcgaagacgttgacgagatcgggtgggatgagctcgttgaagccggacataaaggcgtcgaactgctcctcgactcgcttcatgatcttccattccgtaaccaacctacgacatgattagcggggttttatcatgataaaggctgagatttgttccactcactcaatgtactgtggcttgttctcgttggtgacgggaatatcccggccaccgggtatcaaatcaatggtgcgacgctcgccaaacttctcatcgtcaaccgaaaatgtgagttccacaattccgtcaatgtcattatccctgtcatggtgttaatattgctcaaaatagaatcacgtaacaaactcacagtgtccatgccaaattccggtgcagatcctcatccacaccttccatatcttgaagactgactttcttgcgcaacatcatcttgtagaaagctccaataaagaaggaatccaggaaacgacggtggaagatagccagaccaaccactcggccgatgaacttgaaataattgagatgctcggggttcacgcccgagtggggattaatctgcaaggtataattatcgtgggcagagtactcgaagagacaatagaaaggattgaacatttcatgagagaggaggaagaagaattcactgtgagagttagcattttgactgataccggagaaaagaagaacggaacataccgcgaaagaccaccgtagtcgagaccatcttcgccatcgaacttgatcattaggcgcttcttaagatcggatgcgctctggcgcataatttcggcatatgaatcctcgaagatgttattacgacggactttaacgtggcactgtccggacataatgcgcaatgcgggttgggaccggaagtagatcagcttgcgccggaagtcacgcttgtactggggcacaccctgatccaaagaggaggggagtcgcggatcatcccatgtagttgtcttggtgttgtggtcgacgaaatatacgcgagcagtgttggtaagacgcatctcccagccgctgggaagaggacccaattgggatacgggttgctgttgaatggtggtgttgttcgcgccacctgtggtctgtccctggccgtacatgcggatgtactgctgccgacgaggatcgacccatgttgtcgtgcgcgtgttgtggtccacgaagtagggccgtccctcgggcgtcactcgtcgttcccagcctggcggaagctcccctgtgcctgcagtggtggctcccgtcgccatcatggagatcgcagcagcgttagacccggcgggggctccagttgccagagaggttcctgcgttaggcccgggtggtggtgtaggtgcctgctgggcatcaggcaggttgggtgaattggcgccggtccgatcttctggaagcattcggctctggtgggcccgacgttcgagctgcatgtttgcttcgcgctgagaacgctgggtatgctcgttatagttggccgatggtcgtgaccaggtcgtggtgcgcgtattatggtccacataatatgtccgtcccaaattgtcttcgcgccgttcgtatccggcggggagtcgaccctggctgtcctcaaaggagctgagattggcgcgagatggggcgccaggtccagggggattggttggggcgccattcgacgggggaggagcgccggctggaggaccggtggtcggagtgcgctggggcaatgatgaacttgaagctgcggcaggggtcgtatcggtattgttggggccagcctgtgattgagctgttggtgctgcaacctggggcacaaggccgctggaagtcgatgattgagcctgttgacgctgaagtccattctggttcggatgcggggcggtgaggtttgacgatagattgatgatcaattttccgtgaaccacgaggttgtcgttcgattttttcagatccctagtaagcatttctgtggggggcacatggccgtcaggtcagcccacgtttctctgactcgcgatcggcgttctgcggacgtaccatcaccacccatcgacaagtcaatgacatcgccgatgcgaacattgatgactccgaggaacccctgatccttcttcttgaatttcttctggtcgaagatttgaatcgcaagaatgctgtcctcattgactctcctgtaaatatccatggttaataaggttcaccctttcccctgacagcgggcaaatacgtacaaatcgaacggctcattccaatacggattcagagtcttcttgatcaccgaagttgtatgtgtttgctctcctccaacagtagcgacggcgaatggatcggggaatcctagaaagaggtggtcagttcaaccccgcaggactcgatcaaccgatccgaaggagacgacatacggaagacatcgcgtttgtacaagccgtcagccgcgataactatatgccagagatgttagtcttgtacggatgcggaaccccgcagagtcccacgatgattcgacggaacgacagtcttacttgtgacccggagatttggctggctataatgcatgttagcgatgatctgaagatccagattagaacagagcccgaggcgagtccaacttacgctgggagatttgacgccatgatgctttacaagcgccgatcaatcacgcccaaagaacagcgcgggcgcgcacattcacgagggggagaaggaccaaaccgagttcgcccagggtcaaagcctggaaagcgtggataggttggggatttgcaggtttggtgatgggtggtagtagtgttaagagaggagaaggaagagaaagaaagggttaggcgttaggtgcgcccggggtttgtatggcgcaggtactcggactacgtattcactatgtacgagatacccggtcagtacttcctggggctgagcacggtagatttctaacgttgaattataatctcgctatcattttactacataagcccatattgtatagccctagaaagtcatattcaattttttcccaggttaccttctaagcatacgtaatagagtaaatttagcgggtgtgggcgggtagagtggcaatttgatattaataggatggtaataaggaatatcacagctatgccagctaccccagctatcctggtaagagttacggctttttgtttaggcaaccgtatttagatgatgttcgaagttctttatatgccgccattggtactatagtatgtaccctgtacttgtaccctatataatacacaacccttctagttatacccccgtgtacattaaatacaactcccaaagccaacaatagccaaatctcatctcgtattcttttttttttttgctaattctttgcccggaaattattgtacagcacagttcccacaactccatacccacacatagagaaaatgaggagaggattcagttccggtcctgaaatcggacaccagacccgggatttccagaagcacgctcaaacaaaacacttagtagggcgagaaaccacggcctcggccccggtagggagcaccaccgcgatatccaccaccacgagggaagccacggccacgaccgcggccgaagccacgaccacggccacggtgcatcccaggcaggttggtacgcttaggcacgacctgttattcgacataagtgagtgtaaagagaataggaccaacatttataaaccgaccttcaagttgcgaccgcgaaagacactctcgttcaacaccagagcctgagcgactaggctaggttccgcaaattcaacataggcataactgcagcgccttgtcagctcatatccatatatattccagtccatctgttcagatctcaccctttgggctggccagagaacttgtccagcaaaatggtaacccggttgatggaaccacagctctggaaatgagcctgaatttcctctggcgaagcaccgtagtcgacattgccgacgaaaatgctacgcgcatcaatatcttccttgttctcttggaggctctcggtttgctggtcgaggtcggcttgcatctcccgcagcttggcggcctcggattccatctcggccactcgtcgcttcatggcctcaatctcttcctgtagggatcaatcatgtcagcggggtatgccttgtatatgagaaaaagtatgcgacgttggtatgaaagaaatgacccaaaaatctcgaacaaagagtggaattgctttcaatgcagcggaacaaccctacctcgtcatctgcaccatcttcctggtgtggaatctgctccgccttgacctccactggaatctcctgaccttcagcagccatcttgtcggtaaaaaaagagaagtgttaagttgagggtattcgaagggtcggtgaacgcgccggtaataccgatgaggggagcaagtcagagctctccgagggtcggtataatctttacgcctcaaattttgtatatgaaaacgaagggattgagttgcttgaacttgggaacggcccaggtgatttgtacgagttagatccctctgttcaagacctctaggcggcagagaattgaagttctggggtttggcaatgagaggctttctatttcgggaatagcgcctttccgacgataaatcggcatactgccgggcggtatatacttccagcctcacttgacagggttcacttcactaaatgtcagactgggatatggccctaggccttaaatagggatctcggtttctgttatggtctagtggtaaaataagctgtatattttccacactaagtacaaacattcgccttttgaaaagtggagaaattgagtatctttgtatggcaccgcctgtacaaaagtacatcggcatgatatttcaattatctgaattcttcaccatcgactagatagaacttgaaaagaattatcaagtggaaaagttatagaccattggtgtttatggagtcctgtgtttgacatgatcttgttcctctccattgaatgttagtttaatcctagttcaagggtgcagaaattcggaccatcgagttatcatgcctatgcacatgttgcatgtgttgaaagtttgctagataagcagaaactccatggaccaggagagacgcgcgagcaagacataagagaatcacaaaacgaaatcagagcgagggattcagcccgtaagaatagatgacaatatcgtagcagattttgaggaaatgactcaattcaaggtatcatgtatcaaattgaaaaagcatgagatctgctacaagtcagaaggaaggagaagaacgtatgatcaggcgaacaccaaggcaattatgtacacggatgaggggaaaagtaggacaataggcataacttataaggacggcatcacgaagccggggggtggttcttgcggaaggagaccttctcaacagcgacattttctaccccattggcgtcggtcttcagctgatagacgtacaacacaaggacatcaccttggatctattcggagtcagcatgtacactatccttcaaatcaggcagggcaacccacgtccatgaggcagaaactcggtgtaggttcctcgtcatctggccagaagcccgagctcatagcacccgttgcgcttcccgggttgataaagaaccgaccctccatctcaaatgcctcgaagcggtgggtaccaccccacagcaggacatcgacatccatctggcgggcggcaataagcagtgcctcggcgtcggcgggtggcacgatggtgtggccatgggtgaacccaattcgtaaactgccatgggtcacgatcttagagagagcgaggttgggagaatcgacatcgtagtcacccttgaccatctgtaggtccggggctacctcgcggaggaaatcataggtctcgcgatcagtcaagttgcccagacaaagggtctggccgatcttgccaggggtcaggagtttgcgaaactagaatcgagagtcattatcagcatgctggagtagattgtgacgcaaaagacagacggaccttggctggaagatcctagacgacgtgttagcggagacagtgaagctgagctgaggacagcttacaggagctcggtcagggatgaacaggtcaccaatgaccaagaccaaacgggcggtcatcctggatggcgcgtgtggggtcaatgaagatcaatggtccatccacggtgattggaaatcggaaatcggagcaaagccagaaagaaacaacgcctgttggcttcagcctgatggagcttcgcggggaagagcaactaagcaatgccctaagccctattttatgtcctaatatggctagcgctatctgctctatgaagccatctcgatcttgattttctttcgcattggctcatcagaccgaacgtctcgtccgaaatgcttttcggtttgatgaggccaatcacatgctacacctctcttcgagggtttactcttggtggaggtcgccggaggagaatactacattggggttcgacaatcgaatagagtagcagttgccgggcagacatcggcatttggatttgatattatatagacattcaacgagagaacgagtgtagtattcgatactccaatctccaatatatgtgagtgaacagtacggagtacagcatatatactccgggatgatataaaatgacaaacatcctgcagaataccccagatattgccccatatccccaaataccctctatagaagaaatcatacggcgtgagactcagacggttggaaatctcactcggtaggatccgcccggccatcttttctccgacgtcaaaccccgaaagaaaaacagccatcttcggagacaagactcagttcatatataacccaagtctcacttcgcacgtcctcggttctatcgtccgagtcaacaaatcatcgaattctcctcggaatctcggccaatccactcggcggtgatccccgaaatccccttaccctcgggaactcctccaatcccctttcacgcgaagaaaaactaccccgcggctcgccgcaatcggaaaactggcgtccagatcgcctacggagcgtttgagcctgatttccagacacctggaccagcgtctcccattgcctgacctcaatactcccttctcgaccgaaagaaattcactatttcccgacgacatcgaatataaacccattgatcgctccattcctcctgcccctctctcatcaactcccactatgtctattcaaacccctcacaacaccctcctgatcccaggacccatcgaattcgacgatgccgtcctccagtctatgtcccactatgcgtgagtcacaatatactatgctacaatatacaaccaactaactctcccagtgagagccacgtcgcccccggcttcgtcaaggtcttcggcgagaccctaactctcgtccgcaaggtcttccaatctaccaaccccgccgcgcagcccttcatcatcgccggaagcggcacactgggctgggatcttgtctccgccaacctgatcgagcgcggggagaacgccctcgttcttaacaccggatacttcggcgactccttcggccagtgcctcgagacatatggtgctaacgtcacccaccttaaggcacccatcggcgatcgctcttcgctcgaggaagtggagcaagctctcaaggagaagtcgtacaaggtcatcaccctcacacacgtcgacacctcaaccggcgtcctttctgacgttaagggcgtggcacaattggtgcgccgcgtcagcccagaaaccctcgtggtcgtggacggcgtgtgtagtgtcggctcggaggagatcgccttcgacgagtgggatctcgatgccgtccttacagcttcgcaaaaggccatcggctgcccacccggtctcagcatcgtcatgacatctggacgcgccatccaggccgcccagtcgcgcaagaccccgcccagttcttactacgcctctatcgccaactggctccctatcatgaagaactacgagaacaacaaggcctcttacttcgctaccccacccacccagctcgtccacgccctccacaccaccctcacccagatcaccgttgatgtccccgcccgcttcgctatccacgccaaggtctcggataaggtcaaggctgctgttgccgagcttggtctgaagcaggtcgcttcccgccctgaatgccaggctcatggcatgactgccatttacttgcctgagggtctggttccggctgatgtcctgcctggactgcttaagcggggtgtcatctttgcagctggcctgcacaaggagattgctactaagtacatccggttcggccacatgggtgtcagtgtcactgatcccaagcgtggtgacattgacaatgccctgacggcgctcaaggaggctctgaccgaggccaagcaggctaagggtctgtaagggctgtactccggtagatcatgtaaataggatcactcagacttatctagagtaaaccttgtagatcacttttgggtaaaactactgcaatgaattattgattattgataatgtttgttatatctcagtttcagaaactaacttgcatagcatcatgatcctgtgattttatggaagctcatcatcgtatagaagcatcaatcttcctcttttacctaccatgatatttataattctacctacagccctgaattaacaagaagcaaaccttctaatctgcagctacccgccaatcctccacattctggaatcctccctattggcgagtctaaccaggcccaaggcactagccgaagaatgcaccagacttgtagggatggacatgaacaaccagtcacagttaggaatgtaatattgtgccaggaatcactcctcgcagtcttatattttcccttgtcagctcctacttagtatcagagaagccggaaatatgccaagaccccctgtaacacccctagacagcaatgcattgagcaaccctgtcttgaataaaaacggcggatcttcaatgtttcgcgtagcactatggtgtggatggttcctgcatcgctagccaaactagggctatactttcacatggaatctccttgtggttttcgatagggttatgcctgagatgaaggtgaaggtggtaggagtagaatgttatgtcttttatagaatgtagcagtagacttcattttatttgcatgtatcccctatatgtatcatccataaagtagcgaagcgttccaaccctgatcatatcttgatataaaatctatacaagatgcattacttgaaacccatcctcccatttatcctagcagccgctactttcgcctcagcagccacaacgacagccacactagcagacaatgcgatgaatactacatgtgtatcagacaagtaagttgggtcgatctgcatacgcattccaaattgagcccagatactgactatctaaccaaatagcattctgcagcaatgcgtccaaccaatgcaatctaccttagcaaactgcgcaccggacgattggaattgccagtgtactagtagcacaaatatcctggagtaagtctcatctaacacctcgacaattcctaaaacttactctatacgccaccttcgcgcatcctaataacacattgacactaataccacctcagctgctatgataactgtcccaacgacacatcgagaaaggacgccgaatccatgcgccaacaaaactgcgctaatgctaaagcacatgtgccaacatcaatatcaacagctgcatctgctataagctctagtagagctgcggctacgaggagcactgacattgaggacggaacggaaatttccgactctgaggccgagaatgagttcaaggaacatccgataaagcagtatagtgggttagaggctaattcgatcccccgtccagaacagggatctgcttctgttttgaggatgggtggttgcttgagttttctaggtcttgcactaagtatcattctttcgttctagtgttgtcttcaatattactgtgtgttccatatactataaataccgtcctaagcctactctcccatgcacatattgtactttatttttttcgctgacattttcttcaagtaacgcacgaactcagacccaaagaaaacgaaccagaaaccattgtaacaaactgcacagtagtaaaagaaaacaattgcccgtctcataacgcgctatgcatcatttccgaatggctgaacaacttcaaacccgtttcttgtatctccgactgactctccggcaatccagcatagaatggtgacccagtcgtctaagttattttggataccgtccttaaagtccatgattcgcgacgaacgaatttgaagagccttggggttctgcttgtcatgccagatctgaaggatacggacttgaaaatccgatactgagaagactgtgatagggatgtatcggtggtcgttatatccatcttcgagtcggcgcttagcgatcaagccataggaaacagatacctcacccgagttaaggcgatcaataaggtgaggctgtgaatcaactatgaaggcgttgatatggggctgagacgctttcttcgcgtttgtccagcctgcgagcttccattgccattggggtgcatatacagagcccagattgttgctatatagtaaggatagttagataaaggtattatatagtataggaactcagcgacttactcttcatcaaggatataagccggcatattctcaccaaagaagttatccagagaatagtggaaggccttgaccacctggcacgcgttaagccaccgccggtattgatataactccgggatatccttgatattcaggccgtggatatcgaattcatcccaacgttgttaacgtatcacataataggcgaatggattcacaaagcgagggccatagtctaggggatcaccggaagataattctagttcggtggtagtgatatgcagattttcctcgttgctgcgagagagaaggagagcgagggccttccgagtggcgttatggcaggttttaacgtaaacctgaccttcgtcccactgcgtcgtttggggctcatgctctgatgtgatgggcttcatactgtgtccgcctgtcggtcacgatagcgagtcaggcgttgaagtctgctaggttgtgctgtcggaaacaagagagtgagacagcttttatagctgatgtgataaggctagaacctgttgttggtcttcttacgtgccttgttgttgttgtgttggttgattggcgtcggttggcttgccaagctggattgaagaaaagcaactaagcccaattgagatttgacacggcagagccgccaaacggtgcttctaactagtagagttccttcgtcgctactataacctccttgagagttttaagataaccgtttttgcgaagtactattcgaaagtataggtataggtataggtatagctacgatccgggaatatttctagtaacaggtaataattactactacttaggaagagtagggcgtttcgctacaaaaaggctacacggtgaaaacgagatttctagatgtaccctttcacactgagtggaaacatctattcatatagcaataagaatgcaataatcatagtcgctgctgaacaaaagaaaaagcgaaagtaaaaataaagaaaagaaaaaagcaaatttgactcctccgtggcttgtcctccgggctgcagcatagcaataacttagaggttcttcatggcaagaattgcgtcacagacatcagctccaagcacagttccagcgtcagcgtcacgagtggaggtatcgccggagtcaaacgtcttgtcttgaacaagggattcggggagttccgatccggaaacacaacgggctagtgtaaccagcgtcgaccgattgaggtactcgccagccgagggccaaaaacgcgtggcttcaaccttccttgccacggcgtcactaactcctcggctctttgcatttaggtatgcaatgatgaagcagaagtacaaataccgttcgcgaggacggttatcggaaacgaacgtcaatggcttgttgtcaatgtcctattatatcattgatataatactcaactctagcttttgcaatactaacctttagtctcatataagatccatcaaagaaaccgatggtgtcctccttctttgattcgtccaagacaacacacctccattgagttggacttttcatcgggccgggcataggtacaatcgcgatggtacctcggtcgaaaagtagctcaatattttctgccagtgtgatgcctaatttgtatgagtcagtcatttcctttgccacaaagagaatattcttacgattgcggcggtcaccaagaactccattgctgactccgaataggtggcaaacatccttggatgtcatagatttgggtacaagatgagcagctttgatattattttggggaagtacagtgcccaacacatgacaccacccaaagccagggcgacaatgctcattgataccgtagtacgcgtagaccttcttcttgaacgcagattgatcatacttggaacctttctgttttgcacgtgcccccagcacacgggagattctagcgtcgcggtaagcatgctcgagcaggctttggtcaaccggtccttcaatcctctgacgtttcgctgaaacttgttcagcaatgtcttcgatgatcaatgggcgctgtgccttcaggacatgaatggttgataatgacgaacggaaggactctaagaaggtttgtatttcttgctgaaaggtgtcgtgggagatcttttctgtctttcttgcttcgttgaggccgtctcggacacatcgtatatactcaagttcactttccattgccgcgaatttcatgccaagaatatcggatattgtcaattcatctgacatctcagaaaggcgggatgctacacttacagacctttgcttgtaagtccgtagcgctaattgacgagagggcgccataagagacgatattctttcggggatcatgggggactcggcaggctttttcactgacggtattatgcggacaagaaaatgaagggctgatcaaactggaaagaagaggtaacaggctagtgaggtgttgggagaaatgcaatatcagtggataagctgaagaaaggtgacagactgatgaaagtgccaagctgaagtaaaagagcaactaagcctaattcgggtttgacatggcggagccgtagtcattaaagccgttactagagtagttgctcaaagcggtctctcgagcggttttcaagcggttgcttaagtagttgcttaggtagttgaagtagttgctaaagtaattgacataaagtggttgattaaacagttaataatgatcatgatatgataaaggggacttgattttattagcagtttgcataccaggaaatatgcctaattgtgaaggctgtactgaattacaaggataggggagaataagctagctagagggcagtcgcttcgctctgcaacgaggctgtcgagatccctagtatcttacagtcaaaattacaaaacacgtaaaatacagcccataccgttatcagcttcgataacagcttatacgatctccacgcaagcttcaacatccttccaaggttctatcgtctgcccagtacgaattgcctcccctcagtaatctcgctatggcgaaggaagtaattactaggacagcacgttcccagcctgataaaagccaagaccatcacaatgacagagagaatgacaacaaacaacatgaatcattccatccgcgccatatcaccctagagacattccacaacctgctatcccactacccatcaacggtagagcgagtacacctcaacaagctgaggctgaagctgcagtcaaaggcagggaagggaccaaaacgaaaagcggggacgaaggttagcatagcgccgaccacaaagacggagctcgatccgtccgaggagaagcgtattatcgaagagagggagaagttcctccagcttgaccggtggcgctatgaagttctgccgaagattatcgcggagcgggcgagtgagggtggtcagaaagaaagcgcgccggagggagcgcacttgctcaaggaggagttaattgatatcatggaatggaagacgtgagtaacaatttgcggtattcatactacaggttctggctttgtctgacttatttctaggaaacatggtgtttcccgtcccatgctcatgggaatggtgaaaagcaaccaagtcgcaacgatcaccaagtctacatctacggcttttgccgccctcccagatgcagaccctgtaattgcgccgaatgatgcattccccaaagccagtttggacgctcttactgcgcctatccgtggcgtcggcccagctactgcatctttgattttgtctattgccacggtcttcggcgatgctaagaaacaagtgcccttttacagcgacgatgtgtatctttggctttgtctgacggatttcccagaaggtatacattgcaaagagcagaagccttctaaacacaagaagcccaatggggagttgattgtcaagtacaatatgaatgagtatcgagatctgtggaatgcctcacaggagctgcgagcacggcttaacaatggcgctggagaaagatctgtctcctttatcgatattgagagggctgcttatgtgctccgcaatatcgctgtctcggattactatgccaaccaagaacccgaggctggtctaaatattgtgaaagatattgattcggtgaataaccagctaccaaaggaatcaaagatagattctggcgagcttggcacgaggcgtagtaagaggataaagcaagaagctacgtgatgacagctgtatactattgaggattgtgcctttcatgctgttgccacttcttcccatactcctagctggagacaagatgaatatcaggagggatctcaagcaagaggaaatccaacacgcattatcccagatatgatgtctctgataaaatagccaaacggatacgatcgtctcacgccttctgtacactaagtcttttacggggtacaagcaccttcccttttcccaaccgccagtatctcttcattaaagcaacggcgggaggaacctataagaatgacaaatgaataaagagacatctgcactggacactcggaggatgttatatagtcgacatgacgcactgctgatcgacatacctatctctacctcggtcatcatgattcgtcattcatattccatagattggtatgatgaagcccaaattataatcctcgtgactctatattgatttacgaccagtagttcatcaatatcttcgatttaatctgcctaacttgctatactatagacaacctacgcgagactaccatgaactacctattccagacgtatatcgtatgcaaactatggctgctacacttcctaggcaacgacatagcaaaggaagcccggcaaagattctaatataatcttcatgatcaatatcaccttcatgacacaccacctgaagccgattcggaagtagaagagcccggcaataactagggtctacataactgaatacaggaatttagttgaccattttgtatagttattacacaggacctgactcaagaccgcttgctggttacagtattcactacggagtatagtctaagttcagaaccgcatctatgccaaaccagtcgcattttttctcagtctcattgctatgtacacagtcacggccgtcacgtcttgattaaaagcagatatgggatacaggagagacgcatgcatcacaagaaataaaagtggggtaggggtaagacagaagaaattcatcagatcatgcaatccatgcattacgggtcatcgtcaagatgaccggtttttccggtgaattgtgtttcgacatgacgcagaggggtagggagaaataagtaatggtggatggtggatagatagtcaggggacatgaagatacgtaatgtctcccgtagggagaagcgaagaagagaggagatgagagaggtcggaatggtaacggcactgtgtgaaaagtggcagtacagactggatcagggcgcgtgagatcatagcagggcattctaccccggtttttttcatgttttttcatagaacaaatagtgaaccccgtcattaccgcttggacggattaggcttgcgctcggcagcacgcttggtcttggcattgtccgcggaagaattgagatagcccacatgctgatcgtcgttatcgctgaacggcacaatagatgagatcttcttagagcgactgcgcttcaagggctgggacaaaggtggcccggtttgcggcgcaggactcgcgagcgaaggtcccggcttggcttcggcggcagccgatggggcagcggcgcgctcgtcgtcctcgacatggatgtggcggaactcctggtcctcctcatctgcttcggatgacgcaggactgtcggagtcggaagctgcctcgtaatcatcctcatcatcactgaccaagctgggggcctggttagcttcgatggcgttggggctcagagtttggtgatccatgtccgattcccgagactgcagagattgggatttgccagcgagcgagatgtccaggaaggactgtgggcgcgagggggtcgcatgctcgatgggcggggtgtgcgcgcggtcgagtgcctttcggctctctgactctccagcagtttgaccaacaggaatacgcatcagctggcgaccggtgcgagcaccaagggagggacggctggttcccgccgacactcctcgatagtcatccgtttccgagtcatcgtcgaaaagaccaccgagatctacaggctttcgggattcttccaccaacttgtccatgtttagaccagcaccacgtgatttcatgagagcggacagatgaggagttgcaggagaagccaaaaactgtgggtttggaggctgttggatgggctcggagcgtcggcgattggtcggttcagcagttgcgggaggagtggtaacagcagacgtggtagccgtagccggtttgcggggggtgacaaagtccttagcgggtgtacgaagagatttccagggggttgtagcaacgtgggtagagcggatgagaggatgcacgtagcccggaattgttggattggcagtgggctcagcagagccaccgacaacaatcccggcgtcgtccacctgaacagattgaccgcaagccatggcagcagcgtcgtggctggcaaagttgcggttgtgcgcgatgcggcagtgattaatgaatccctgagtgctggagaagttatcgcgccggcagtccagacagaccagcttgaccaggacaccatccgacttgcgccggatgagcatgggtcccgacttctccttgaccacagggtaaccagccgacagtgcggtatgcttggtggcagttgagcctcgctggggacgggtctttccggccagcatgcccatctcaccgggattcccgcgcgtcgaccgaccctcaaccagcgaattggctcgcatcccagagccgacttcaccaccgtcaaagcgagggtcgggaagcaaccaccgggcgtagtggcgggcgtagggaccttccgttactccccatggagcaggcgacatcggcgcgggaccatttccaggtgccagcactgacgcgcccgttcccgagctcacatctggcgagacaccggcaacatgggatccgggatacgggatttcgccacagcgtcgcagctgttccagagcgacttggcacttggcgatctcctggtcaataagacgaagctcgttgtgcttgagtaacacctccaagctcagctgggcggtgatggtttcccgaagtcgggtcacactaggtctggcgacgacggcgtcctgcgccggcggacgcgcggatgcgaccggtgagtctgacgatggggttggagtagaaggggtcggggtgatcgagtcagcgatcacggtcggagttgggcgcgtagaaatggagtcggcgtagactttcgtcctagcgggcgcatcgggcgcatcggtcgcgtcggactcggagtctgaacgtttgcgtttgagctggggcagcgacagagcgttgataccacagtttggcagcattttgacatcatccatcaccttattccctcctatagtagagggccagggaagcaagcgaaacatgccatgtgactgcatagagatggttttggattaggtggcagatggtccatgcgttccaagtttattacgggaaaggaatggacgtcgattgcgcgaccggatgttgattacggaaggcagaaaaaaaaatctattaataagagggaggagagtacaataaagagaagggggggggagaatgagaatgggagaaagaatagtggacagaggaacaattggaaaggaaagggaaaggggaagaaagggggattgcgagagagacagaataagagagaataatgggaatgggaatgggggagaggtgcctgagaggagaacggggtggagtggatgatgcgatacttgttgttcccatacaaattgtatggtcgggccatgtaccattggataatcccattggatcagtctcaaatatctgcgacacgtcatacactatttacctgaattatttatttatttacggagtacaatacggggtatacggagtatctattctattatgaatgattcaaggcattcatgtcgtcctattcacctactacctattcacagttactgtattcatccataacccataaccttttcacattcggactatgctggtacccaatataaagcactctgaccgatcctcttgcatgccaagcctataacgggtctgggccttgccctattcctgcctaagctagctgtatctacgatctggaagatccctagcaaatcagatcctacatctataaatttggccgggggcgaaccggctataaacaggttctgactgcgcctcaattgcatgtgcgaaacacaaaagtacaactcatattgcataggtcagatgtggctgagaaagcaaatggaaagtggtggaagattgtcgaaccgaagggaacaagggagaataggggcaattctagggaactctatatacaaccatcggagccattattctacgagatatattgcccctatttatagcgtcatttgctgacatccggggtatactctagccattttaaggcatatcaagatcggactcttatcaagatattccacgatcatagtacataaccctaactcgtatccgtatctcttcctgacttttaatctgcatccactcatacctttcgctcatttactgtacggagtatactttccgtcaccatcctgactatcgtagaaatgtacttggtcaaccttgcataatatatatatcgtattggttcctagcacagacaacagtacgatccctctctctaacatttccgagataactcgctgcagagtataatatatacttcatatactaagcacattcgaatctccaatatttcattcatgcactccgcattatgtggatgcgatcaacttcagaccccgaattctaatcctagcctgcagatcacttggacttatgtaccggtttgaaactcggctgttcgtgttgtaatctatcgacgttaatttacggaccacctagatactattcaagatatgtatacagataaggcatgtgaaaatcatatttaacgttgcaatcaaaatagtagcccctgcttttgcggaccatacagcgaatctgttatcgtcaattgtctactcctcgagtcactccaacacactcccagcattaacaccccttagcgccttgcacaaacaaccaacaacagccttatcgatccctaactacggtataaacctagttggctagctcgaatgctggttaggtttattctcgagcggggactttcacgggattagtattactttcagtgtgcaaatgctgggcgaatttgtgctgatgcgagggatggaaggggatgggaggttcctatgtttgttgatgagtggtctcgagaggctggtaataactatcaatgttcttgcgctccgtggtattacattctgggcacaaagttctccagtgataacaggtttactgccaaaggttaatctgaatcattgtgaaactttgctgagcgtatctagggatagacaatttctcgtgagattgacagtgtgtacatatagaatgccacgatatattcaattctagttcaatcgttcattctttttcgcttgttagacaagcacaatccccaaacgccagtgcaataaaagaagatagacgctcgactcgagcatatggacgcgaaaggcattctggcctcataagcgtaaagcaggccaacacacgccaagtgaatacataaaacagatatggttgtcgaaataaacagtgaacgaacaataatgggccaacgtgatcaatggtatagcattcagatggcgagacggagaaatcaaatctccaatccaacatcgccatccccacaagaaaagcaatagtatccactatccaggctgggcctagttcatctccccatccttaatccgcaagatgaagttaacaacgatagcggcgagcagggcaatggcgaggattgtgggaccgaatcgatcatcgataccgctctgcccgcgccgacggatactctgcgcacgccagtggaatgtcacgagggcgtagatcattgcgcccatggcgatgacggtgaagagagctgcggagatgcgaccgatgcgatcgccgaagttgagcagaccgacggctaggccgcccaggatgacggtgaagttcagccatgagaggaaggtacgctcgtttgcgaaaaagactttgggctcaactcgggttgggagggcgatccgcttgcctggtgggtgttagctgggttcgggtggagattggagggttgaaaggtggttgtggtgtgggttaggatggtgcaattgttctgcttctcttgagtgtggaggttatcgtggtgtgagtcggcctccacagcccaagagaagcaaaacaattgtgcgccaggaagaatggcggtgacgggagtgtgtctaggtggaattgtctctcatgcggagctgctgagctgctgagattggaggtgttgtcggacttacccggagcggtttggaggagaggttggctagacattgtcggatgtgaagaggggaggttgttgggagaggtcggaagaagagaattattggaagaaaaatccaaactcagtcaggtacagagactggcgaaggaaaaagcaagttaaaagaagcgagaggcttcaaaagtcaagatctcgccccccccaatgttctgttccgtcctgggactagcgcatacagctctgttgcacgtgttcccacgatttgatgagaggatcaggtgactaagtatacgaaatagcgtgggtttttagttttgatcttggatattattacagaatacctgtatcattcatatatcaattggtcagatctctattaacagaaagtgcctgaattcgacacaatatatgctcttcattgatatttacaacgttggattccggaggcccgagtttcaaccctctttgccttactctcatacggcgaaggtgaatggtcaatgcaaaaataggcacggcatcaagctttagacttcatcttgatattatccgaatatcccccgaattagtagagctgacaggtaaaatgtacaaaattcagcccaacattgcatgcatctataccatatgcctgtatcgggtatcttgaaataatatccttcccgatatcgccccaattaaaatgggtcgagacctaattcaaggtctagaatatatagatccacttagtctaatatagccgctatgctggcattaattgggtgaatggtagtctaaattcgaagagatggagtgatcaaaagagattatcctcccgcatagctgttacaaagctgtgaggttatgagaagagttcaaagataatgcaatttccatgtttgggactaagtaatttagtgtgctatagttagggtttggagggataccatcaagtgaaacgaaccctacgtcatagtctccttcctagcccaatcctcgagaatcaaatccgccgccttctccgcaacagcatacacagtgctaacaatattccccgaaacattattcgcgaacacggacgcatccgcaacacgaagtccctccacgcccttcaccctcaatctgctgtccaacgcatcacccatagcaacggacccgttgatgtggtactcgcctaaaacgaggtcatacactgcttctcgggccgtatccatgtcctgcaagttcatactaaggtccggataagcgcgccgcaggaacgaggactccacgtgctttgattttgtgactttatcagcccagcgcagtaaggccgccaggagggagacgtctgctgggtggccgccgtatttggggtcgatgatagggggtttggttgggtctggaagcattagtatatgagatgattgggtactcaggggagtcgtgttctgtcactcacctgcactcccaatatggatagtccctctagatatggggtactgcagagaaaacgccatggtcaaaccagctggttgatcagccgaacgcggtgtaagcagcttgctctggtgatccatcgcatgcgggttcatggaggctggcacggtaagagccttcatattggcagagtggtcgctctcgaggtgtgcaatagtctgtgcaagttgtttcgcgtggaatgcgctggtcggtttgatatcgcgaatactctggatgatctctcccagctccgtctctgagagtattctctttgccgggaaaaagccctgcatggtgctgacagagctaagtggcccgccattggcttcgacatactgcttactagcagcttccattgcctcgggcacttgatacaaggtatcccgtgtgactattccgggctggacatccattacagaaaacgtgagggggtggtctaggacgtttgcaccgacccctttgttagcgaccttgcactcaacgccggcggctttgagaatctctgggtcaccgatccccgatagctcaaggatctgggggctttgcaatgtcccaccgctgacgattacttcacgtcgcgtggagacctggtactcgactccatcgtgtgtgaagcttacgccggtagctttgttgccgtctagtacgacgcgattgacgagggccgagcagacgattttgaggtttggccgagcggtgcggatggcttcatagtatcctcgtgcggagtaactgcgcttgcctttattcgggccggttcgatcgactgcaccgagggtgtggtagaagccgatgtggtcaccactccatgcgtcagtgggcttgcttgatatgccggttacatcctcgcaggctttaatgatgtcgttctccaccggcaggattgaatcattgaagctggtgcgaatgggcccgctcgtgccgtggaactcgcctacaagtggcattgtggaccgatcggtgattgatgggtcgattggctcgagggtctgttcattttgttggtctttccattggaaagaattagattggaaagtctaaatgctgagatcgtacctgatgttttcgcatatactgctgcatatgcttcgcggaccatccatcatcccctaccagctccgcccagtcgtcgtagtcttgtgtcgatcctcgcacgtagatcatataattcatgccgctggatccaccgaggagctttccccgcggcatatgttgagacacgccacgattgccttcctataccccccaggaaatgaattagcgacctgaagcagaagtatgcaatgggagtacctacctgcggcaccgtatacatgcaccaatcatactcgggattctcgaacatctgcgggaaggccgcaggagtatcaactattggatctccaatgcgatacttgcccgcctcaatgacaccgacggttacatccgggttttcgctgaggcgcgctgcgagagcgagtcctgcagttccgccgccgcagatcacatagtcgaacgtggtgctggtgaactcctcgactgtgcaaattggattctcggccattgtatgattgttgatttagactggaagagtgtaattggggagacccacaagttaagtaagcacagaagggatagtaacctcaggtaggacgagctgcgggggttagtaaatacttaccgatagttatgccaatagagtttaaaacataccgaaagcggaaatatatggcatccatctacttcacgaaggttgtcccttggtcaagatcaccgccgctgacgttcatgttcgttggcggcaattctcagtctcaaaaagatagaaatcgtgtttttatatgaatgtaaatcgcttcaaaaaatgctatatgtacaatgtgttagtctcaagtgacccgactgacccggccatgatgtttggatgacgcagtcaccactccaatactcaaagctccatcttccgctgcacccaagcaagagctctctcccacctcgcatccacacaccttagagcatcaaacaactccgaaaccagcgctctacctgaatcccgcgcccaccatcgctgcccatcaagctccctcagcaacaccccccaatacataagaatcagcaacgaaaatggctgccgacaccggagactatcaacaaattctttctcaacagccgcaagccaagcgagaaccggcgccggatccgccgagcgcgcaaacttggcataacaatgcctcaaatgcgcaataactttcttattaataagatgctgccccgagtaaattccaatcataacttgatcattcaattccgatagatgtgtcagcgcagcttctgcatcggtgtcaagttcagcaggcgtgtttttccaaaattcgccctgcgagaataactctagcttaatccacgacttggtgacttgaatgatcttcttcacgccctgcagcagctcgaacagtatcacaatgttttctgtgatactggcgcactcgtctttcgtgacggttagtcggggtgacgcaatgctgatcgcgatcatgacgatcgagtgcgcgaataccgcgtcgcagttctgcggcgtgatattatcgatcgcgttgcggaatggagtcaaactacggttgtagtactgcagtcctgtctcgtagtacaggagtgctaattctggtggttcgcatgttgttgcgatgtgcattgaggctagcgccaagatcccgctcatcagatatccatgtttgaacgcgagtgttgggatggttatttgccagatttttatttccgagtcgctgatacagaggctttcgtacgtctctgttgcgaacttgtgcattagttctaggttgtcgattccgaatgagtttgtctgggctggtgccgggactggtattgctgtgggaacggctcgaccaggcaccgctgtgggcgagccgtggccatctagaggccgaggtacgtcggatgttgaactgggtggggtaagatgggctgtagcgcgacgggcagcggcgactttcaaatatgtgcattttaactcgcgggttgtgcaattcgagcatggtggaccctgctcgtcacatttgacccgcctgtttctgcattgatcgcacccgttgcgggattttgtgtgcgcgcgtagagggggcatgttcaaatttaattgacatggtgcggagaccaatcatgaagatgcctgtgaataaatgcgaggaggaaattatccgaggtagacatgttcccccgtatcatgtgactcgggttctacaccagttttggaagtttgtggcgggttggatatcgcctttcatatgatgtgtacggtattctcggtcacaatggccaaaatcggcagagcattatattatgggcatagtgtatatccttattggaataatcttggaatacatctgaaggctcagatgtcattgcacaagatactattattattagaactgaacataaaatcaacatcaacatccccgtccaaatgagttaggaagaatttcaagtgcaccgtactcaaataagacccacaacagcaaagataccaacaacaacaccagcaatgctaccggacattttctgggcagcaccagtgaaaataggagaagcagaagcagaagcagaagcggtagcggaagagctaccccaggagccactcatagacttcgaaggagtaggcatagtcttgccacccatacccatagcagccataccacttggggtacccattgcagtcttctttccaacctatcaatacaagcaacatcagccctgcaaacaagggacgaggaatgaccgaacaaaaaaagtcaaacgcagaaggtaatctaatttacctcgacgatagcaggaccagcaagaatattgtcatcagtggcctgcttgttgccctgagtgaggacgacatagctctgtccggcaacacccttgggaacagtgacggtgaactttccattacccatggacttgagaggagcccagactggaccggtgacggtgatgaaggcggcattcacgtcactagcactcgcgttgaagccgctgccagccatcaggtgcacttgcgagcctgtcatgacggcgttcatcgagctcatcatgagcgaggggaaggccttcacgggaagcgctccgttgctggagggacacgagacaatgaagggggaggcgacggtgtacacctcattgaagtcgagggggttgtcgaaggcctgggcgaaggggacttcaccgagcgcggcgcgcaggtatgcgctgtgtcgggcctcggtggtgaggatgctgccagcggctgtcaagtaggtgtcgctcatgatggaggctgcggctccgaggtaggcgctgactccgacgcctggggaggttattagtggtgattcttagtgtgattggatatattcttaccctcaagaacactggcaagggctaggaagctgttgacgtcggtggatgggaagttgtaggtgcagcgggcaacaggagaggcgccggcagctagaaaatgttagtatactggtctttctttcgcggtctaaatgacaggaacatacccttgagtgcggaggtcaagaaatcaacgtgctgcttctcatcggaagcaacctccttcaggttggcatagaaagggtccttcatgccggccttgatgaagtccttctgggtgtagttcttgagaccctcctcgtagaaagtggcctcgagatgctcaagggtaagcgcatagttgagcacgtcggctaaagaagaagcacattagacaagtcatgcattggttgggaagtgacataccgtcgctaatagcacgcgtcgagacagggccggcgttggcaagacccatagcggcaccggtgagggcaagattggtgaacttcattctgtagaatagtagagcttcggttatatcttggattgggagtctggatctaaatgaaggatgataaatctatttccaagtagagggacatgtcttttatagctgccctgccggtaatttgggggtccgatgaatggacgcctgctttgagctcgggcattagaattgcctggctgagcagaaactagtcattcttttccttgttttgtggctcatattgctgacatcccaggcgcaagactgagatcggcggtaggggtttcagatcgagacagaaagggttaacggaagactcggatgggatgtcaacaataactccgacagtaactagaggaagacccatgctccacgcgatatcatctgcaggaaccactgtggatcaagccggggcagcttgtagggaagttttcccaggtcgatcatgctcaaagcggaatataatgccatagctttgcatggtggagaactttactgagttctggggctttcagctgcaggaaccctggcggggtcagaagcgagagcgagagcgaaattgaatacgcaacgagagagcacattaatagtagcaccgagagcgaaagcgggaacgagaccgagattgaagcgggagcgagaccgaaactatgtgtactgctctaacaggttttattcctaacttttgagatatccctttttcttttggagttgaacgggaataggtgacttcccatacgacctttgtcaccggcgacataatactttattaatctgatatattcagcgtgagattatagtagggattttacatgtaagaatacctcctctaagtgagtaggtagcgtatatagtacatccacctataacgcttaatagatactatgtacctactacaagctattatgaggacctagttaagcctactgtcttaattatgggactttgccgttgcggcatatgcttagacttcaattcactcgttcgttcgcccagtattcttatcaaccgttattcaccttttcagacgtctgacttggtgatctgccattaacggccttctccccatctgcaggggggagtggcgtctggtctatcgacgcaaaattggaccgcgctcggatattcgccccgtatttatagaaaacaaaaggtatgagcatcaacagcaccgccaatgctccgatgagcgatccagccccacccacaccgagcgcgtcgaacatgtactgcgtgaatagtggggatgccgcggcacagacggaccgcaggacggtatttgctgcgacggcggatgcggcatacatcaggtacgagtcgatgatatagttaatggagacgacaaagatgaggaggattgacgttgcgaggaaagttcctgccacagttggcacggcccagtgaactgagttgtattccgccgtccaagcgaaccaaaatatcgtcactgcgaacataaccccgccaaccatggcgccgggaaggcgatcttctggaactgatttgtagcttttggtgagcttcctttggtatatttggctgttgataaacatcgccaggccgccgagacacgctccgatgactgtgccgatcaatggcagctcgccgacgccggtgttccaaccgcgcttttgctggaagacaatagggtagatgctaaacagcatatacaacagattatagacaacggcaaagtaaatggcgacggagaagctgatcgggtcaatgagaagtctccaaggcctcgtcaaggctactgtgaaaatgcctcccagggaacgatctaatgtctcgactggagccttgacgttctccttgccgggtatcttccggaggcgacgagccttgttgcgcagagccatcattggaagggtctccagtagagtgatgagcaggagctcggtggcacctgccatttagagtaggacatagaaggtccaacgccatgtctccttcagttgaatgaatccactgactactggctcaagagcaggtcctacaaatgtcatcgtcgcaaataggatcatggcgttgccacgcacgacgggtccccatatgtccgcgaggatcccgggtgcattcgttagggcggcactgacggctgtgccagtcaggaaacggccgaccaagaacccggcaaaattaggcgtagaagcccagagaaacccaaaggcaaaggcaaagtaaatggtgaatgagatgtagaagatccagcgacggccgtagaactcggataaaggcgcccaaaatagcggaccggcgcagtagccaaggaggaagagggttgtaacgagtccagcagcctcggtagagacatggaggtcattgctaataccccgaaaagctccggatggtgcagaggaggagaaagtggcattcataacgagggagatagcgacggtggtgatatagcacttccgtacgaacgggtagttttttgggttttcagggtcatttggtgaaaaatcgaggtggccatccttgtcaaagaatagttcctcgtccgaccctaccatgggtcctgaggtagacattaggaagttgtgcctgataaaattcattgctcgtactggtgaaagagcgtgacagtccgtcttgacataaactataaagcagcccgctagaatcatttctaatcgaaagctttaattggatttccaatctatactataagccttccgggaaaacataatcactgtatctggtaattctgccttttcttccggtgctgatatggggcggatgcacgaatccggtaatttcttggcttagttccgggacactatatacagggctagacaaatcaacctcccattaccaatcttaattccgatgacaaattgacataatgtttatagaattcgtttatttcaccctctcatgccgtaagtacaaagttagctcatgtcatgacctctgtcgtctttcactcaactcttcaagctttaccaaagcatccatcaacatcatccagcctcgcaactatagcaatggcaactccaatcgtcacaatgagcttcagtgaagcagcccagaaaagccgcactatccgagctcttgaatcaaagacgacggtccccgacagcactattgtcgggctggccgaggccgccatgttgaccgtcccatcggcctttgataaccagtcggcccggctgacagttttgtttggagacgaccacagaaagctctggtccatcaccgccgatgcgctgctggcgaggattggcgagaagcgctggaatgagggcaccagggaccgcatcgtcaactttgccaacgcctacgggaccatcctgttctgggacgaccagtcgtgcgcggccgcgatgaaggagcacgctccggacatatacaaggacaagacagacgagtgggtgcagcagagcaatggtatacaccagtattacctgtggaccgcctttgatgccctcggactgggtgtcaacctgcagcactacaaccccatcatcgactccgaggcgcagaaggcgtggagcgtcccatcagactggaagctaaaggcacagatggtgtttggcgtccccaaagacggtagcacgctgggggagaaactacagaagcttcccttggagtagaggctgcaggtgtttggagcgaatgcgtgattgacacagaagtggaataatcggtcgcttatattctatacatactcaatgatatagcttgcaatctgaatatcgaattgatttataatgatattacagacgatatgattacgattctaccacaattctactacgatatttttttgatatatttttttgatgccttgttaggataatcagtcgcaacccgtagaatgagccgaaaggtacaattcccgcataacgagggcttgatatataatatctagatcgctagaagtgcttgtttagttacctctactaagttggaaaatccgtagatggccaaatctttgctgggaataaaaacccgactgttgccactcggtcatgtgaccgggccttccttagtgtagctcgcagactagcttaatcaatcatctcttaccatccacactagttgtaccaacttggtagcatgtcttgagatccacctcagcgggatcccctgagctagaaattttcttttctagtaaaatagtcatcggagaccctctgcaaagaggccagtcccccagattccccgacaaagccagccatcactggcaaaatcatcagtttcatcagagcggatggacaaacagctccacagagccatcctcctcgctgtacagctcgataactacatccagctcgaccaaccttgtgctgacgaatttgactctgacacgaagtcaaggatcagcttcctactgagtccccactttaaccgtcccacactacctaaagcagaagatccgtacccacctgactggtcgattcaccgaccaagcctccataaggcgactgtcgaatttattaggcttnnnnnnnnnnnnnnnnnnnnnnnnnnnnnnnnnnnnnnnnnnnnnnnnnnnnnnnnnnnnnnnnnnnnnnnnnnnnnnnnnnnnnnnnnnnnnnnnnnnnnaccatcccacactacccaaagcagaagatccgtacccacctgactggtcgattcaccgaccaagcctccataaggcgactgtcgaattcattaggctttcccctttcatctctccaccgatacagccaagccaagctgagccacccaggccactaggaaggaaagccacacgtatacgcagacagaaaagccgtacaccgactcccgaaggacctactacccagactctggaagaaaccacccagccatctgtagaaccaacagatctggaactggaggagttttctcggagtccgactggcgtccagcctgtcccacatgttacaagggagataaccggcactggcacaatcatccagcccgacccgcctattgctgttccgcaagacagcagtagcttgtcgtcaacaagtcaaagctacatcaaccctataaccccactgtcggacacgatacagcctcacgcaagacaacccaggagattcatccagagaacctgttcggtccaacgaccagcattgcaacgaacacaacccgaacaacaacgaacacaacccgaacaacaacgaacacaacccgaacaagtcgtaatcggaaataacaatatggctggaggcgaaggaaactcagcggcccccggaggcttcacgctggaacagagggaggttatggttcagatgatccaacaagcagttactcaatcacttccccaagcaatatccggcgccctatccaccattcctcttaggcaacctggaccccctggaccaccaggaccaccagggcctgacggtcagctagcgcaccccgacacaacgtggaaaatcgcggaaattggttgtttcgatccagacaacaaagccacaacagcaattcggtcagtgaaccacatcaaccattataccaacgtctactcttgggtggaccacatgcgagacatcgccaagctgaaatccgaagacgttgtccgctcgcatatgagctactccctgaagaacaaagccaccaactggtatgacgcagaattgaccagcctggagaaggaagccctacgtgtacttccccttgaggacggatggtacaaagagttgatcaaacggtggaagccacctctcgccgaagctttacggaaaatggatttcaccacgtacagctggacagatgtccgagctggaaaagagccaagggaatacgctcaagagatcgtgcggcacgcccgagctgcaggccgtactgatctttatgaacaactattgaagatacgagaaaacatcgagccgtcccttcgagctgttgtcatgaacccaaccacgtcaaccacgctggctgaattcctagaacacctagacgtcaaattcttggattggcaggaccaagtccagttgagagatcgacgcctacaaacccgtaggtcgcagcccccaccgaggaatccaaggacccagaacccaaggatccaagaaggcccccaggctccaggccgcccccaaaatacccagttctggacttcacaccgcttccaagctaacaacccgcagtctggtcttaatacatacaatcagcagcgcccacagaaccgtcagagttggcaagcccaaccaaggtggcagaaccagcaacgcgggaactggcagcaaacccaagctcgcgaccaaggaaacctagccagaccggaacagcgccagttgcccgctctacagcagggtcaacccggaactgaacaaagacaacttagaatctcagaccggccgtattatcaaaacgaggaagcaaatgcgaaccaagtccgaagacaaacctggaaccaacgaaggccaaccgcatacgtaactgacctcgaggaccaagctgaccaagaactcgatcaaggtgaatactgccaaggcgacggctacgatgactcggatgactttgaggcgtactacggggaaccgtacctcgacgagccatatcaagaaccgccacaccaggaacagcctgggaatgaagactcaggaccagctacggcacagctttgtcatcctcaattctctgtgacttgcttgaattgtgatgtcagttttgaatcgggaaataccctccacaaacaccttgacagctgcaagcccccggcagcagggaccactgaagaagtagcaccggctttcttcgcaaacggcaccttgccattgtacgaatccgaccgtgccaaaactcacgatcctggatacgcatttcgtacttggaggtacgcaacagctacaatagcgttgggttcccgcaatcagtgcatcacagcttgtctggactccggatgcgtcatgaccctcattgattccgacatagcgaagaaactggatatcccaatttccaagttgtctaagccaatctcagtcagtggcatcggatcacagcacacatcggaggagtggataaagcttgacatttacttcatgggaccagttgcgacagccaaactgacgatcgaggctcaccttgtacaagaccttaaagccagactcctcatcggcatggacgtcctaggacccgaagggatctctatgaacttcgatcaaaggacagcacgaattgcctcctgcaaagacatggaattcggtatcagtatccagtcaaagccaaacaaaatggagccaaaaccagtctattcagcagacaagatcacaatccctccccacactatggttaacgttccaatcagaataagatccaagctaccggaggggcgtgacttcatcttccaaccggacgagaaacaagggacaatgtacacccatatggtgaattccaacttcgtattcgtcccagtcaccaaccaaacatctgtcgcacgaaccatcccacgccgagttcggataggcacaattatggagaacgacgatcccacaggatatatggtgcacccagctgaagcagctttagcggccacaccagataaccaagcacaaccgaagagtaacctgaggcccaaaaacagcaaagaaaccacgctacctaatgggatcacggtatacggcgacgaagccacagcgaacgcactcaaggaagtgctcctcaagtacaatgtttggtcaaaccccgaggtcgtggacattccccccgacagatggatgaggatcccgatgctagagggctgggagaaaagggtaaagagaaagagagtctacccgactggagaagcagagaaggaattaatcgacaaagtattcaacaagctccaagccgaaggtaagctcaaatgggctaccgatcatactccgactggatacccggtatttgtcacatatcgggatgtgatcagagatggagtccgtacccgcgtcggacgcccagtggtcgacctgcgagacgcaaacaaggaagctgtgaaggacatgtaccccgtgcctactcaagatgacatattgatactttgctatggaaagctgtttattacagtctttgacgctgctgcttggttttaccaatggcgggtccatatggacgatgtgggaaagctcggcgtgatcacccacagaggtcacgaaatattcctggtgactatgatgggccattgcaattcagtggcctacgttcagcgggaattagatcatttgcttcggaagatccggaaattctgcagggcctacattgatgatctcgttgtagcctcggacagcttggccgaacatatctcccacctccacgagctcctcagcattctccaggaatacaacatccgcctggaaccgaagaaatcattcgtcggtttcccgagtgtcaacctactcggccaaagggtcgactcgctaggaatgacaacgatggaggagaagctgcgcgctgtgcttagcctggactttccccgtacgctgaaggagctggagacctacctgggcctagcaggatacttccgtaccaaaatatggagacacgcacagatcgtcaaagccatgcaggacaggaagacgaacctactcaaggcaggaccaacgaaaggaccacagaggagagccttctcgataagaacgctgttcgagaaccctacaggtgccgaaagggccagctttgacaatctccaggctgcaatgcgacacgctcttgttcatatgacagtgttttttgaccacacaagacagctttatgcggaaattgacagctcaaaggatgaaggacacagcgcaatgatcttccacgttaagaaagactgggtccatactgatatgaaaaagccacctccagcaaatgtggttgaaccgataatgttcctgagccgacaactgtcccaagccgagcggaattactggccaactgaactggaggtcgcgtgtctagtctgggtgctacagaagaccagacatctgcttctcgcaatcccagccagtctcccagcaatcgtgtataccgatcacagcgctacggtcaatatctcagtgaacacaaatctacggtccgcggcgacagaaaaccagaatctccgactagtaagagcagcccaattcatccagacgttcaacttgaaggtctatcacagatccggagcgacgaacaaggttgcggacgctctctcgagactccggagcaacatgccgacgaagcctaaggaggacacggatctggacaactttacgcaaggaattgacgctttcccagcgactccggtaactggcgcagtagcacaagaaagccccagaatacacagaagagtctttacggaactctcggacgaaataaaagagacaattctttcaggataccagaccgacacccgatggcatagagtcatccaaaccttgcgaggggaggaagcctcggcggaccctgtgccaaccaagctgccgtacaggttggactgcaacggattactgtacttgacgtataatgacggagctgaagcactctgcctcccaaagtcaatgacgaaagacatcttctcactgattcacgacaaccaagctcaccaaggctacgaccgctgctggcaacgattgaaagggatctgcttctacaagggggcaaagctattgagagaatacatcaagagatgccccatatgccttgagcacagaacaccgaggcacagaccgtacggtttgctccagccaatcctatcgccacccattccatatcatactttgactatggactttatcgtcgcgctgcctgctaccccagaaggatttgacgctttgttagcaatgaccgacaaattctcaaagcagaacggctttgttccaggaaaaacgacctgggaaggagccgactgggccgaagcagtagttaccttttggtggactgcagattggggcttcccggccgaaatcatatccgacagagacccgaaattcattcaaggtctatggaaaggcattttcatgctattgcgtgttgaattgttctataccacagcttaccacccccaagccgatggccaatcagagagaacgaaccaaaccatcgagataacgattcgacactggtgcgcacaacaagctctccaagccggcccggacgacgagaaaccgaccagcaattgggccaaagccctaccattcttacaagctacgcttaactcttccgctaatgcctccaccggctactcgccgcacaagctcatgtatggcgtggagctgaagcaaccactagacatgatgcggcaagccttcgcaaccagccaagattttacagctagactggacgccgaacacagcttggcctatgcggccatggcgatgaagaattactacgacaagtcccacattcggaagtggtacagcccaggcgattttgtctatctgcgactcggacacggatacgacatcaaggccaaccagggactgccgaggaaactggcccaacgattcgtgggcaaattcaaagtcttacaacgagttggatctctagcgtacaaactcgatctcccgagctcctggaagattcacccagtgattagcgttgagcacctagagccagacccacccggtgaagatctctgggaaagaactcccgagccagcccagttgccagaaataggaccccaagccgtacaggcagtcatcagtaagcggactcggaacgtcggacgcccaagagcagacggtactagagctcagagaaccgaatacctcgtcagattcgtgggccgtggagctgctgacgatcaatggatttcggcttcagagctgggctacgctagctggttcgaacaatacgaccagcggggcagtcgcaactaatcccaactcagaaaaccaatcacttttatatttaattgcattccttacactatcaaccaagcttatgcaacgagcaaacaactcttacagctctcactttaccttcacttgatcctcacccgcttactttccccgagaccatctatactcacccatccttctaaatcttccttttttctcattcctctttgtgcatccctctaagtcttcttccctttcttattcctctttatgcaactccttcatctgaacaacacgcactacaacatgcctgctaaacgcaaggttccatcggccaacgatgattcgccagtcggcaagagaacggcgccgaagccgggttcaagggcctacgctaaacagctattgaaccttatgaccgaaactgacatggcttgcaccgtcgcagatgaagaaaagtacgcccaagtgatggaatggtcgcagagagaaaccaacaagagactcgacgccgaaaccaactacgctgaacgtgcactatggacccctggcgaagaacccccgactgactttggcaaagtcctgaccgcagctgagatggcagaagcaccgctttgtatcgagaaccagatcgaccaaaacggtgaatgggttccgccaccacgcggtgtgaagctgagcgacgaaggtgtatatctggccgccaaaaatatgactgctgtggagcgcggacaaagattcccagtcgacttcgataagaacgggcatgtccgagccacacgcatcccagaagacccagcaccactcggttgggcccatggcttacctatgataatggtggcacgagggataatcccactcgttggacgagagcatgccacaaagctgggcaacctcaccctgaaaaccgacgccaatatcaaaaattccccagctttcacagtcggcccagtggtcgcatcgaaatcctttgtcgaaatgagcagatcgatccagcgccaatatgtcacccataagcccgaccgggagtacaaaatggagtacaacgtggataccgcagttgacatggtctccaacgaccaccaggacatggcaatcctcctaggtgactctcacactggcgctccaagccgtctggtacgcctagttgatttcgacgggtatcagatcgagcgcgcggacaagacaaagaacaataacgcttacgttgttccccgcactttcttcaagaagtacggtattcccgggtacgacgacgcaaaacacagactttacgaaaactgcaaagaccccttgccgaaacccgaaggcagccagtctatatcaagctcgtccacatcctcgcatacactcgttccggaacaacctgaagaagcaaagcctaccgaggagaccgatatcacattgattatcaagctcaacgccatcgaacaacttgactccgaaggggctcaggtagcgaaaaacatccaccagttaggccatcagaaacaggaatacatagcttggtacaccgacgacgcgacgacccagtacgaggaatacaaagactggataaatgggtacaataaagcccataccgctgagaaggaacgtgagatcttagccagggaacttgctgcccaggttcagtctgtcaaaatggatttctctggggaggttttgaaatctctgctcctccactacgtcccaaacctcgacaccctgacgcaggaggaagcacagcaggattgaccttgcactcggatttccttttacaccaattttaatatccatttttacaagagccctcggggcgagggcttcttcggaaggggcgcctgttgccacttggtcatgtgaccgggccttccttagtgtagctcgcagactagcttaatcaatcatctcttaccatccacactagttgtaccaacttggtagcatgtcttgagatccacctcagcgggatcccctgagctagaaattttcttttctagtaaaatagtcatcggagaccctctgcaaagaggccagtcccccagattccccgacaaagccagccatcacccaccgaccccacaatttgctgctgaaagggttcattggccgagatcgacggggttaacatccatggatgcacaaacggaccgaagctgtggcggacgggcgcttatcttaaagctaacacccatggcatacctgcagggccctctaacttaatatctcccaacttcctctatgtttcacagattctctgccgcacctgcaaaggcagacagccaaaatcaaggctcaagatcggctcggccagaaacaagactagcgacacaaactctaggcctagcctcgaacacacagtccgtcccctggctaagagaaaaaaggccgctagagcatgtgaccgctgccgcctacatcgcatcaagtgcgatgagcagaagctgtgtacacagtgcgtcggcattaaggcaaagtgcatcgtgtcctatgccacatcacgcttgtctcgggccaacaatgacggtgcgagatctgaatcgccggccgtactccctccaaggtcgtcatcaccctagcctacttatgctgcacgtcgcaacgatagggccagcacaagcagctccatcgccaacaccagcccaactgtccctccttctggcataaacatggaccaggagaattcattggcgacagaatttccggataacgccacaaaggaatttttcaatcttgctcatatccaaggcttctttcccaaggggcagagctctgaacttggaggttgtctcttcccccagctcccatgtcccagcgttccattgggggaacgccctttcgcttcgaatgtgcttctcaaaagctagcgtagctactatctccggcttttctgggaagtttgccacccgcttctgccgatcatgagcaagattgaattcgccgagcttgagaccctgccgccaccgaccatgtatgatgagtattcggtaactagcgccctggtcgattctatgatcgctctgggagtacagaatagccatgtcactggccttgctgggcgtatattgggtctccagcagtcatcctaccccgcagccctcccaccggaagctgcttggcccggttttgaatatttccaccgctcccgtcagtgtatgagggcaacacagatgagacattggaggccctgaaatgtcaagttctcatggtcctctacctcttgaaggggaacgctttccgtgacgcatacaacctgcttggcatcactgtccgcaaggcctacatttctaaactccattgaccgcaaccaagtaatctccccgagattgaaaggacttctcgcctgcagctgtggtggatgctcttttccctgaatctccagtgctcgctgcagctcgacatgcccccggctagccaaaagagcctcgccaaatgcccttttcctgacgaggacgctctggcccgctatgtttcctcgccacacgaggatggcttgaacgcttacatgtactcgacccatttagttaagttctccatgattgtagctgacattggcgtatgcgcctcaatcgcggacctcgtcgacgacgacggcaatagcccggccgctctcgaaaatcacgcccttaacctctcatctgctccccgaaatcttgaggtctggcgcgaccagctaccttcagagctactcctgagccggtatgggaacagctccggcaatagtgagatgctcgattttgatcgtaccttgactctgccaaacaggctgcaccggcaagcggtgctcttggagcttcattatcacaacgcgtatacgctgctccagcgccccttcacgcgtctacactacgcccacaccagcagcatgatcacctcacccaactcccggcagccgggcgttgagttgcacattgctagcgcactccaccacgcaagtattatcgtcgatactgtatccacggtctgctccatgtccgatattttctacggctggccagctctggaacgcggcgttgacaatcgtagcctacgtccccgctaactcgctcatctccgtggtgccgcgagcgcttgactccctcacgcgcgcccaggccgttttcgacctctttccctccacctccccgaccgccctctctgcgaagggcattgtccagtcactcctcgacagtctgcagaatatgaacgcacagggcgcatgcgcagtcgccaatgatgagccgataggataggacttattcgtgccatcgctcgaggatcagcaaatgtctaacaatctcttccctccgtttatgtccttcgtgccgcaaaccaaggcccccgacctaatgcagtttggtgactgttgatacttgcgcctgacccgggtatccaccacgccataacctcaagggctggaatctcctaattattggtcacaaccgctctcgtatacgcagatgaattcctgccatggtatgaagattctcaccgctaaggaacgtgacgctgggagaatatcgcattacgatagtactttggcgttgtctccttggtctatgaggaggggagggcggacgaggtaccgttgatgagaaccatcctcccgctgaaacattccgaggctctatagtttcatgttaagttgatcgtacacgacacagtttcagccacggtcgagcatactttgaaaacctagggattagcggaaagttctccttggggtacttccggtacttccggcacttccgggaaatctttcaagaaatttcctttctggttgccttgcagcttcgacttggggttgtcctttcgaggcgcataccatgatagagccggaattcactcaataataaggcttcctgtcaccggggccttttcttcagttgattcccctattaggccaaaatgagtctctttttgccgttctgatatcaaaaattctacttcgtatattctgtcagactggaatgggccctctaggccctaaataagaccttggtttttgtttatgggtcaacaacttagtggtaagatagggctgtatttttgccttctaccatgcagatggtcgtagtaccaaatatacccatactaattgtgaacctcataggggagatggtgtatcaaatacatggatttacacagaatcaacagggaattaaccggaagatcatacaaccagcttatattaagccgtggtaatatatcttctaggccaatcaacactgtcgataaccaaaatagtggagaactcccaaggagcaggttttaggagggttctgtcttcacgtgccacccgggaattcgagtctcggctttaccaattattttcaatgagttgctactttgtgactactagtcagttatgagccagcgactattatgacttctgcaggcgtaagcgcctctcatcggaccccggaagaagatctggagcgcgagcggatccgtgatttgtcgaggtttgtggcgtttggccagtatccttgtcccactgatcaccactgatcatttccataacagatattattgtacagtcagtcaagcgtttccagcacccgatgcaacgacttttgaggaggatgagacgcctgcgacattgacgggagatgaacagcccacaggttgcgagctagccaaggacattaccctcaacgcactcgctcagctcggtgtcctccgcttcaatgccaaccgctccttcgtgtccataatcgacggcgaaacccagcatatcatcgccgaagcgaccggctcagtgtcgctacgagataagaatcgccacaaaccaggagatggtatctatctcggagcgcggtcgctagacctgatctggggcgtttgtccccacaccgttcgcttgttcacaggccgcgcgacggacgaaatctatactgataatgtaaccgccaatcgaacgcgccatattattcgagatttcaccctggaggatcgcttcaaggatcgaccatatgttctacagtggccgcatatgcgcttctacgcagaggtgcctctattcagcgcttctggatacgttctcggctcctattgcattgtcgacaacaaaccacgggcagattttggagatgatcaggtcaatgacctccaggaagtggccgacgccattggactgcatctggagaatgtccgaatgagccgggcccatgttcggactgaaggattggtcaaaggcttgacagatttcgttaaataccatgcggactttgatcctaaagaggcctctaaccgtggccgtcttcagtctggtgttaatgcagcgaattccataccacatgaaattgccgtcaccggtccggtgcttgatgtgccattgggtcatgatgttcgatgtgtttctcccaagcccgaacgatcgctttcctcagccgtcacgggggaaggatctgtgtttttctcgcaggatcaacgctctacgaccgaactgtcatctctatactcggggttttccgatcgaccagtaatgctgagtcccggcgaagaaaagtcgatgggtgaagtattgaagtcagtagatgccggtgcagctccaggtgtcgatcaagagttctcgcagctatcattaacccagggcactcccatatacgaacgcattgcatctatatattcgcgtgcaagtacattgctccgggaatctatggacctggacggggttgcattcctcgatgcctgtccaactaattttgcgttgtgagtacatccatctttctattgcgtggtatcttataacatttcttcgccagtgtacccaaagagccagaagttagggagccgtcgatagctgcagatcccgggttcccggctgctccgctgcctatccctcttgggctagctcgggttgtgtcgcatgaattcgaccttccgtgcgatactttgagttgtgcactaaagttgccatctaaaggcaatcctggcccaaataatcaaccacgaataccacagggattgctccatcaaatgctcaagtctttcccccaaggtcagatcctaagtttagatgagcctattgacgaggatgattgtttctcgaatgattacactagcgactttgattctcggcctgatcccaacactcaaacctgtgcaaaacaccttgcacggtgcctccccggtgctaaatcggccctgttccttcctttgtgggattggaataaatgtcgttggctttctggggtgctggtatggactacaagtagttatcgagctcttgggctggaggagttacactatttcaaggtttttggtgattctttggtttctgaagtttctcgaattcattgggcaactaccgaaagatcaaaattcgatttcatatcctctgtcagccacgaactgcggtcgccactgcacggaatactggcgagtgctgaattattacatgccagttctcttagctcatcgcaagaagagatggtgaccatgatcgaaaaatctgggatgacgttgttagatacaacgaatcatatgtgagtccacccgagtagacattggatatagaaaatgtactaatacgccctaggttggaattctgcaaggttaacaatttgagccatacggacaggatgaatgaaatgatcccagaaaatgacacggccaatcttatttccgattttaacattagccatttggtggaagaggttgcagacatattgtacaccggtcagcgagcacctgagcaggtgagccagctcgctaaaaggatgtcgtccaacaaggaagcatgcgattcgatcagcaaggattctagggcacaaaaccaactctctgttgtcgtacgagttgaccaaacggacacctggatgattcgctcccttgcaggtgcctggaggagaattgtgatgaatcttctcggcaatgctatgaagtggaccacagccggcttcatcgaaatagcgttatccaaagtcagagaccgatcggactcccaatcaccgcttgtgcatctctctattactgataccggctgtggaatcgcgcccgatttcatcaaacacaaactgttcgccccattctcccaagaagacccgctgtccgagggcgtcgggctgggtcttagcatggtacagcaattggtgatgtcgctcggggggcatgtcaatgtaaggagcgagataggccttgggactcaggccgatgtctacatcccggttcaatatctacctgctagtattgctccggaggatagcctgacaccgacaaccactcagccaggaactaccccaatgcatgcatgcttggtaggcttcaatggttatcctgacctcacagaggctcccactggaattctcaccgtcgaaagcaaacgaaatctttccattcagagtgcacttgcaaatatcttcatgacaaagatgaagtggagaatttcgctggctgactccatcgacaaagctcgtggccaggtcattgtcattgaggaggaactcctcagacgaactatggatgaaaatggtcaacttgtgtcagaaatggcagctcaaaatggctttgacttcttcatcgtgctgagcggcaatgtcccaatcatactcgacagtctctctgtcaacatcatccgcgttgcccaaccgtacgttacaatttctttacaatttttgatatgaaaactcatctcttttgcagattcggaccacagaaaatttacaaagccgttgaaaaaattatgaagtggcgcgaaatccaaacaaaagcctcgtcccctgcgcccgaagctgctttccaggtcatgtctccaccaatacaaagaaaaatcagttcagactccgactctgacgtctgtggtagagggacgtccgagtactcgaatgaagcaatgagctcaccgggaggatcaagcagctccacaccccgaccatccagcaagcaagcactggctcatgtgctcattgtggacgacaatgaaattaatgtcaaggtactgtcccacgtcgcttccgaggtctgagcaccgctaacacaaactagatcatgtccaccttcatgcgcaaaatcaactgcagctatgacacagcccacaacggcctcgtcgcattggagaaatacaaatcctcgaactttcactatgacttcgtcctgatggacatttcaatgccggtgatggacggcctcgtctcaacgagcaaaattcgcgaattcgaacgcgaacataatatcagaccctcttgcatcatggctgtcactggagtttcctccactggcttccagcaccaggctactacggctggtatcgataactacctcatcaaacccctctcccttcgcgccctcagaactcttatgaacgtttcatgataccatctatttgaatttagaatggctgatctttggccctcattgcacagcgtggtgttggtgggtttttcttcggtcttccgtgtgtatagaaatgaacacgctatagaaattgcgtcctgccttggttccagtacgtattttgatgtgagtttctcaacttgtacaaagataagtaggttcgatgaatgtgagacacgccaaggatccccgatccccatgtctcacaagtacgatgacccctgtacttgtcgagagcgaaccatatgccgcggatatctctgctccgtctcggccttgccaatatttaccccgcgcctctcgttgatcatgtacaacgcatgtcatattttgtacatcaagaaaagctcaaatgaaccacatacctactggttcagtaacgaatgcacagtggaaatattcacccaaatatcacaaaattgtctcatttctcatttagtctgttaggatttgttaattgtatggttaaaaaataacgagccgcgtgagagtcgagtgcgtccggggcctatcgcattgttgcattggggttggggtgttgaaatcccatctttatgtcgcgttggaggtgttgaagagccatcaattcgggctgcaagggctgtgagtcgctcgggctttgcgtcatggttggcatgggtctcgttcagtcgcgatcgatcttctctagaatgagcaacactgccttgtcgccgtgtccctttacatagtctataagttcctcagtaactatcttcaccaggccctccgccaccaacttctcaacctcggcttggaaccctccagacacccagatctcttgcaaaatcgtcgagacaacgacacccttattcttcgcgacccggacgagctctctcagagcaggatctggcccaacatgaccaagagtgaaagttcccacacacgacacgagatcgtatgttccatccgccttgtcaatcgggcggttcatgtccgcgactgtgagatctcgatagatgccagtctttcttgcgacagaaagcatggcgggagacagatcaatgccatcaattgccttggcctgggccattgaaagagccactccgaccagcccggtcccgcaaccggcgtccaatatcacgctgtttgtggcgccgtttgagagcccgtgtttgacggcggcttgagcgacaagcacgggagcaacgtagtcctgagcactgtctccaacttcatcgtcatacgaggctgcccatttctcgtatagagccatgcaatcttcggtgctgctgctggcgcgggcttgactgaggtatagttcgctggctgagcttgaggccttggcctggattggagttggggccaacatcgtggatgattgagattggtgccgtagaaggggctttgttaaatggtttaggagattgaaatattgcgtgtgtggttgcgaagggatcttggtatttctgccctaagagattagaactgaatgagttgtagtccattcccaagcctttgcggtattcttatagtcattggacagcacttggacatattctagaagttatggcgtgatgcggggttattgatgaatggacctgaaaagagtgaagtttggtcgatcgatgatgtcggtggaacataggttcgagcgtgctgagcctgggcctgggcctaggcatgatgcatgttcctacgctgagtatctacgcggttgccgaggtaatgaatgctcatttttctaattcaattatccgcagatggaagatatgaaaagcagtaatcattgctgttgatctgaggctctgccttgagtcgtaggcaagactagataatattttgtcggacctttcttcctctctgaaacacaattatccaccagtcatacatgtcatagggatttgtacttggccaatcatccgatctgatctggacatgtaacctgttctcttgttctcatccatatcccccataaattaagattagattgacgtggagggccccaccggggttaccattatagcgtcgatctatttcctagagtggcttggctccatcttagcctcaatttattccgaggtcgagtaatatggggtagctgtggagtgaccaacctcgttttcttaccagtgctccttgcgtgcacccatgcatcattgcctagtgatgattgggtattaacttttcggaggcttctaggccaacattacagttcaatccaatagcaaataatgctagatgccaagtgagagtgagaataattttgccgcggtagccagatacactgaaggtcagtgataataccactctgtcggactctgtagatcctgtttgtgtttgcagatcacgtgcatacggtatttttcattttcgacattgagttttaagcctccgtggcaccttccgtttcgggaaccgaggtttcccttcatcttccaacgaaagtctagatggagtaggaggtattattgactatataccaagatttatgtgaatactcacacaacagagcagctgacttgacattgaacagaggtaggaactactccgatcgaggacgaatccatgcctgtttcgcagaagggcctcacgaatcgtcttttgaggccactcaacagggttgagcccgggtacctttcatgaaatcttgaggaatcttcacgatacatggcttcctattgaggctcagcagtgcatctatgggacattgcccttccgagaaggaaatgtgctggatcttttacatagttggatctgtcagcatttggaggtattcatggtggcttgactgtcctgtcattgtcatcatctctaatgtctactttagggggttgtaagaccactttctcaagtctttttcgatgccgtcggaaacagatcgataacgagaatctaacggacccgaatgattggaaccacgctttcgctggtgaaacaaaatattccgagaagaccctccgattaatcggattctaccttcacgaaacgaatatatgaagagtttggaaatacctcgaggctccccaattcttggtcatcttcggtcgccactattgccgtttcatatctcttccagttacaagtcgaaaataaagatggaacgacaacattcgatattatttcccttgtgtacacaatcttcgagattgccgcaggtcattccaccaaatctcggcgtaagcatgatgcccatgttcaaacccgctacggccccttttctatcaagccatcttggaaatggaacacacaactatggccacacatctcgttatgggagcaccgccgagcacgggcaaaaagaaccgcatctttgaatcagaggactgtcgatcaggtttgagttgtacctaaggcccaataatctacacaccaggagacagtacaattccccgacaatttctccctcgggcagattaggaaaatcctagctggcgctccttaccgagcaaagttatgctttcggctgcttttgttccctaagagaagtgaacagttgcggtgtttctttaacaagaagttggaaaacagagacgcgtcactttatgtacctcaataatattgcatgcaacttgtcatatatcgtaatatgaagtaatcaataaagaccttaaatcaaagattctctgtccgctccacagaaattgtttcccgtccaatcaaccacgagttcgtgactgccactcatggtcatctatcaaatacatagcactagtacggagttcgtatcacatgcaaccaaattgcgatcttgtctcctgtgcacgggccataaatggtaatattaccagaataggaacattgtggtacgctatgatacgctggaaattacgagatctttgaactacgaggtcttcgttattttcccacaatctttctccgccatcatatgtccaccttttgtttactctatctactttttgataaacacacctcatatgacagtgacgatgggcaagatgagggacaactcattccactacttcatgcggctgcctctggaactgcgtcgcattatctggatgcactgtctaccgtatcgtattgcagaagaagacatccctgaatgccttttcaacggctgcgaatccaaccaagcctgcgacacccgcaagacgatgaaacaaaacgcccagcagccgaccatcacattcgttaatagcgagtcttggctggtcgcactagaacagggacaaatattgaaatctgttgagatcaatactctggagtcaatatgggtacagccgcatcgagatgtactgcatcttaactggatacgactatactacactatctggggagttgatcacgatgctccgggtagggctgacgagttcctattgcatgcgaaggatcttgggatgcgtccttctgtcatggcggaacttattcacccttttaacttgaaggcggtgttagatggcggtgatggttctgatccgcccggtgacctgtcgccttttcatatcggcgtatctgtcatgccggtgcttccttatcactgcatagaaggtgatgatatgcgcgagatggtcgatgttctaccttgggcgaaaggccaaagaagcatgctagacatagccatggcgggggtttctctacatatcaccagggaagcagctctgagatctggcctgtttggattattgggtgatgcgcctgttcagatgattgatgttgacgacagggctcggttgagggagtttgaagcattattcagggaacacacattggaaaaggaaccagccgtgcaaaagctattcgatgcattcacaagctcgcgattccaaaaggccacggaaaaatggaaaaaaaagctgaatggtatatcctggcttacatgtggcagtcggcacgagacagagagctcggcattcttgggacgaacccgggttctgcttggctacctcacctgtcagaggagaagaatatcagcatgtctcagtatttacccgatgagaggcatccgtgggtgaagcaagctaggcaagtcgcccccaagctgcgactgcggatcatggtgcggtattgtaccaatgagtgttgcataaaggagctacgtcccgaattcttcgggtatccataagtagtacttatttggtaaagagatatttcgagtaccaattcaacagatagaagaatatgagcggctttaaaaagattctctcctttggcggatgggcgttccacagagtcgggcacgttccagcgcttcagagatgccactaagccagagaatcgcgggacatttgtcaataacctggtgagcttcgtgagctctcaaaatctcgatggtttcgattctgattgggagtgatctggtgcacctgatattccgaacatcactcccggaagtcctgaaggaaacaactcccttgctttcctgcagttgctctgaagctagctgcccagcggaaaatccatttccattgcgctcccgacttcttactgatacttgaagcagtatcctgtaaaggatgtggcaaaatacgtggattactttatttacatgatgatgtatgacttgcacggccaatggggtaagtaacacagacttgagataaaattggctagaacgacgtgctaggaattagagcggtcgggataagcgaatcgccgttccgcctcctgtggacacttggagactgtaacggtactcaaatgaccccaggaagattatagcaagtgaaataattatagaaactataggcctaggaaagccgcgctagatgtgtctaccgctttcaagtgaagaaacattcaatcgcaactgggtctgccagcgatacctgcctggtagagagggaatccatccgatgcaccgttttgctggaccaaacctagaacagacatggctaagttctccaggtgtttgctcatgtggaccactagcttcttccaattatcgaaggtatttccacaaaatcgacacgactcctgtgacgtttgtttgatctcttgacgacactgctcgactatctcccacagtcgatcgatatctaagtctcgttggacttcagaatgcctctctgaagtgagatcattggatttcttcaccttcggctcgagcatcttgtgctcacgaactagatgctggacaaaattgtctttgcgaaagcactttttgctgcagtcggagtacgagcagacccaccactctgactgccggcgcctttcggtctcgtggcgcacccagtccgctttccgtttgaatgatttatcctcagagcagtcggaaaatgtacatgtgaatggttgcaaatctgcttgaacatgtttcgaccagtgggatggtttcaaaaacttcttgacctgaaagcagatggggcactcgaactgagagggaaacagcgagacaggaggaatgggaactgcaggggggaattcagccacaggcgctgctgtttcgcccatatcagagagccgatcagaatttcgactaacgtccattccctggagcaagcctgaggggtccttaggaagctgcaatgaggattccccgcctcccagagcaaaacaatactcgcctgagcggcacgagcggttggtgacagcgtctatatggtttcgctggaaattaacaagaacattataccggcgaagctgctcactcgcaaagcgatggaccaaagcaggctccagccgtgggtacaaatgcagaatgtgctttttgaatccttccacggtagggtcgatcaatggtgagacagcaaggaagtccatcgcaagccctgggttttcaacaaggctgcggatatcgctatcattgtcttcagtcccttcagtatcattacccctggctgtatgctgcggtatttggcctgaatagggcccgggatttgcacactcgccaatatttgctttccccttaacaccaggaccaatcgccgtgttctccaaacccttgtgtagggtcgccaacagacgggaaaattcggctgatttagggagcgagaagattgtcaatcccgagttagtgtccacaatatatggatctgctcccgcttggagaagaagctctgccgtctcatagtttccccgccagcatgctgcgaacagaggtgtggatccatagcgtccacctggagcatcaacttctgcggaaaggacagatgcaagaatagctttgacgatcggaaccaagccgaatgaagctgcatagtacaacgggttcgttgtctcgatggctacagtaggtacttcagggataagtgcctgcacccatacgccaaaattacctcgacgaggaagatattgagaattaaagaatttgttgacgagttgatagtcgcgatcatcgaaactgcatgatccgccatgggtagcccagaactgggccgcatattctagaaatgggtgctcgtgctcgcgtgatgcgattgaatcgatggagcttgtatatccagacagaaaattatcgagacacaaataggtaaggctgagtcgcattatgatttgatcggcggtttcgtgattcaaactgaaatatcgcacgctagaggagcggatccactcggacgttaggaaatccttgatagatgcgtgagataacttcacatttctaaactcatcctgggtgatgagtccctgacaaatatcgagaaggatttgcggcgaaaccagccttaagtcgtcatccaaatatgtgcacgtcttctctagtatgactgcttcgctcaactcgggtagggtgagcgaacgttttgagaaactgagccaaaagagggcgttgcggctgagttcccagtcacttggtgggattcgctctaagatgtgtatatatgtctctcgtagagtttttggcaatgtttgcaatgcttctcgaattgacttggcggtccgaagtgagccgagggtttccaaagaaagctgggtccagcgaaatctgcaaaaatgggtcagatacgaagatagtattttagtgtgatactgacgatccatcagctccttccagaatagtcgtccaaatctgatcttggagacgcgtgctcagattcctgagcgtctcgtcttgctgcagtctgaagcgtatgaatacgtcgatatcgtctctgacaatttcagcattcatatgaattacattggcatgctgtccggggatcagattggccgttccagttatgagaattcgaaggtttggggccaaattcgagattttcagaagagaacgtattatgatctctttataaacactctcattaattgcatcaataagaagaatgactcgtttaccaccagagctaatcttgatgatggcatcttcaatggcaccaatgtcgattggacgtctgtatgcacttgactttgttgtcgctttgaagagcggccagatagactctaataccgagggaatcgattcagagagctggactaggagcgatcctagaatgttcaccggctcttgaaaggcagtgtcgtcaaatttacagtagaagtaggcaaagaccaatctatggtcatttgaagacatccgtaccagctcatcgacagtatgagcactatagaatgttagctcaataaccactcaagaacatggaggacttgcaaaagtgttgtctttccgattccagctatgaaaaggtgttagactatctcagtgtataatgggtcagggcgtacatttgcctaagaggacgaaaatgctccgatgagtgccatcattccatagccagtcattcaaaataccatcaatgaaccactttcctgtgtgatttgctcgcaaattcgaggcttgcagatggatactacttgggctgacaggagccaaccatcgggaaagctcttcgtgggctgtacggatcatttcatcatttcgtactttcagatcttgttccagagattttgcgaggcttgtgatttcactgtgcaaatctcgctggaggctattgctatcacttgtgataacaaggatcaaccaagattttaccctttctaggcgggtgaggtgcgtgttgagttgttcctgggtgaacggccattccagtttttgcttcactctcttgaatttgttcgctggctctttaatgtctgaaaggagaacttgaagagactcatttgttttttgaaggatgctcatcagaggttctggggtgataagagacagtggtcctaattttgtaggtcgtggaggctcaacttccgagtgaagatgttctagaattcctttgagagcgaaaagctcctcacttaatcttcgaatatcggagcttgcatcacgtacgccttttgcatatgctatgaggcgggggatgatgctgctaatgtcgatgatcagcgacgttatggaaatagggtcagccatggtttccaaaacaatgaaatgccatgcacatatttggaagtctttcgaaactgggaaatcaggcgggctgcccttgtcccacggagtgcgtagtgacgtcaaatcggttgagaataatcttgtaggagcgggttgaaaaaaaaactcgctggtggacttgggggcggcaaggtattaggggatgcacggatatcaaagcaagtggagacaaataagccaataacatctaataactaaggtgatgagcagagaagtgagcagatggagtccttcctcacatccctcagcagtctcccaccgcttcctgccaaagctctcctccatcaacatccagatacctccgtaatggcgccaagactacctctttcaaagctcggaaatattcagaatatgatatcgaacaaatcactgactgccgcgcaaatggtcaaagctgctgactgcagtaagcgtcttatcatcaacatcaagaacaactttcgccggttcgaaaatgtagaaagttcgagtcttgtcacgaagacaaaacataacacctccgacgaaagaagcactgtgcgatcgcctcctcgaaaagcctgggctatatttggatgatattgttacgatctagtgatcgcacttcgcatgtatttgtactatttgcattttcgctcgtagataagtggatgtgatgaacgaactgatttcagacggacaggctggtctccgttaggcgcggcaccatttcagatagctattattccatcgcgacaatcgtagcggtaccagatactactaagatggaattatgctctcttctatagcctgatggttggtggtttatattaatcaactcagtgagcggtcagtgtgaatgaatctcacagacacacgaattgtccaggggtcaattgtgttagctattgcaagtgtactggtgcacgatatccaggaaacagtttctagaggatgaactttgatttgctgatgaagcctgtaagattgccaagcctacctgttgaggtgccaacagccgtgcactgccccggggctcgtgctcgacatcttcgcccttttgtacatcagcccccctcttcgtcatcctccaaccatgagttccaatttatatcaattgtataggccgtgaaacgcaatgtctgggcttgaaatcgtcggggtcgttgccagcaccttccaactcgcagagattggaatcaaactctcggtcaagctttgttccttttaccgccagatcaaagatgcggataattccgcacagcgtcttgcaagtgatgtctcactcacttgcagtatcctatatcaattaggcaagatcttggaacaggacagccagacaaagctttgctcccagcaggcctttctgacggcccaggaagtcttggaggaatgcgagaaaatcttcagtcaaatagacgaagcaatccagaagaaagatccgagttctggtaaaagcaaatgggaacgtggcacacggaggcttacaattgtgatacttggtcccgatcttgacgtgttgaactcacacttggacaagttaaaatcgaccatgttgctgatgctgaatgtgattatgtatgcaagagaaattaaccggtatgtctcatctaaagtatctctcgagatccacgttgttaaactccattgggtaggacatccgatcattcttcgctcgaatgccaacgccagttgattgaaacgcttctccgggagaaagccgaaactgaagctaggttaaagagactcatcaatgtggccgatattcgttcagattgcgatggagtgggtagattgtcgtcttcaacactgggtgcgaaacctagcatgagagtgtggcagcgaccttcaaccggaaacgaaattgacaagtattatgaccttgtcaaaagtctactaaatcaaatcgatgcttgtcaaataaactttcaacaagatcgccatttgaggattagagatggagtggtgaatgttcacaaggccgaacttgccatatttcaacaatcccatggaaaggcagcggcacaggcttttgattgcccctatttcagaattagccaccgaggaagggacagttcttttaccccaaagccgaactccaacatcccctctcaaacggctgaggcgtcaacgaaacgatccaccttgatcacattgggaaattgccattcttttgggcgcagccccttgcctgctattcgtcgagcctccaccagtagtttggatcttgaggccgctcataaaatgtcaaggaatcaccccggttaccgtgaatacactaaacttgagcttaaagaacctatgggggaaatgttcatcaaccagtccagcccaagaattagaagaaactcagcatccgcagcagaccttcatgaaacttctgttggcttctcaatgtccgatctgcaccctgtggccagcttgggtcgagctcggtctccgggtcctttaccttcaacttccaatcaatgtgtggccccgcgcgagcagtttgatagagactaccctctcaacccgcgctatcctacagcgaagtattcgcttgatcggcctctcagcatgactgtgatggacgagcatccccacatgctgcgtaaagaaagacctaaccggcctcaagggcccccatcaacttctgtgggatttgacaatattcgcgtcagagcccgaccatccacatacgccaacaacggaggccacgaccttgctccaatagccttaccccacgagtctgacgatagttgcgatacgtaccccgacaggcaccgtcggcgtcgccgcatacatcgctgcgagagtgataggcacggcggtagtcgatccctggaacagaaagcacttgatgccagcagttcgaaactggtggcgacctcaggtaaggaaagtcccaagaagcgtgttgcgtgggatactttggaagatctgatgctttcctggacgacacttccccgggatatgattcggctatgagaggacgcacgaagcagatgttgaaacgcgtcaataatgccttattccgtattttgtgccacccaccctcgctacgcgaccgagtacggggtatgaacctcaaccagaataatatcttcacgtgaatgagtgcagaccatcttttgcttttggactcttggttatcatagcatgcaaggagttgggttgtagtagaagttatgaattagggcttgggtaggtggcgaaatatatatgccattactatctgctgagtgacagtgttggatatggaagcatcgtctcagcttcacaaattgatctgtacattcccacaatgggtttatttacatctcttttgttatacaaaacgtgccgtctggccataatcactcggccgatcctctaccgtaacggcaactccataattaaccattatattccgctcgtcgctcggatatgccagtttctcctgactgcttgacggactggtagaacggtatgcactcgccgactggtacgactcctcctttcccctgaagctattcaaaggaatatccgttcctctgaaagtacccgagtggtgcgatggtataccagtgcctctacggccccggaggttgtacgagtcatacgggtaggatgtcttggagggcgagatagcagctttcaggacgcgataaaggccggggcaacaaccgatcataacggctaggagaatggcagttagtaaaacgattgaatatgcaagtggaaaagcgggaaatataagcataccgattgatgcctcgatggttccccatagcgctagccatgatggagcggggactccattttcagtatcacctaactgaacgacgcggatggtggaaatgatgatacacacccagccaaaacagaatagcccgccaatgctcagcttttggcggcttttcatctgcagattccagatcaggcggattgggaggatcatgacttagcgtcgagttagctcagtttaaggaataaggagcatagcacgtacttgctaagtcagtggctatatccaccccgtatgcgtagtacaagctgataacggctgcccgatggtcgcgtggagtgttgcattggcctgcagtaaaccaggcatggaagctcgaacatgaaaaccacgatgagagaatgcagccaatgataaactgaaaacagtgtcgtcagtaatttgaacaccagcattcagacgaaaaatccataccaggacacaaaatcccataataacccaccaggcgataatgtacttctttccaaccaacaaccttttatacatcgccaagagcgagaacttgatcatccacaagcagagccataatgaagatgtcgtgacaaaaaagacagtctgtaatcggagtccatcttccgagatggtggcatagggtggaatcgttccggcaccgactgctgctagtcgaaagatgacaggagagatgtagatatagagaatgctcaattccaagaagaatatgtaagcgataatcagaaggtaatcttcacccttgaggtctttgtaactccgaatggcaccagcaaaacgagtgcctacaaccagcgaggtcagtacaatcaaggcaatgccggcacctttaatagtttcgggcccaaaagtgcccgtaatggcctctcccatcctttattgcgagactgaattttagaaaagtacgacagggaccgcgcgggcccctgtcacccatatacatcgagccatttcaccagaactttaacgaacgcatggcggccgatatcttgagtttgagattcacagatgggccacctacagccaccttgtgcaaacttcgaggggtgcatggcttagaatgaacagggattgtaaaacatgcacgaggggcaatatacgaatctctttcgaaggccattgttgaagatgcatgccccgccagccctgggccaatgatagaagaaatatatagtgccggtggggggagggcccgcgccctcagccacggcggttgtgcctcccgtggccattgggggagccgatgacgggccgaggcgcacatggaggggcctgggagagagaggaaagaaacagatctaactagacaggcccatggcgtgagtcagtatagccgtatccagagaaagattatccagttgatcttgaaaggaacaaaagacaggacagatctcggttaatgccagaaggctggggtgaaaattcgaattgagtttggacttctgaaactaagccctgcataagccccggagccctccggaatccgggcgatggtgttctgcgttggccgctcgcttagaaaattcatatcccctatcttttgagagtcacttgcgacttgaggaaaagaaagaaaagaaagagtttgtaacagataaatacaactttacgtaagaataagatggacgagcgaaacaatcgctgccggtgaatctagaagcaaacccacaagtccattgttatgagcttcaagctatgtagcttaacccttcgggctgcgccgcttcgcttagatctggaagcgagattattatatatacgcgttaacgaaagcgaatagcctagtcatactatacgccaattatacggccccgttgattagttacttaatgacacctaatgcatctccggaacctcatcggatcagagcgcaggggaagttaaaaaacaataagctccccccaccttagtttcttctccttttttctttccaagccattgaatttgtctatatatcacgttcgtttctgtttgggttacttgcatagcttttggatcatgcatatttcgacctttattggcgggctatccgcgatttgcggattgaccctagcccagacaactgtgaccagcccggtcatcgaagcggatgatttcagcgtcactggcgcattggaggatctcggtgtggatgtgtcgcaaattcctgcattggagtcattcaccgccattgagacacggtcaaccgataaggcctgtgcagctgctgtaagtaagctcgcaagccatcgagcaataatttattctaaatctctcttagtgcgcaagtttgggattcctttttggctccaaggttgctgctcaagatactactgggtacagcaacttcactagctcgttctggtcagtgcagcaagaagaggtccagcctcgttgtattttccgtcctaccaagaatacggaggtcagcactgcagttttactttcccggttgacaggctgtgagtttgctgctcgcagtggcggccatgcggcctttaccggggcttccagcgcgcctggcggaatcagcatctggttcaaggatatgaatgccgttaccctgaacgcagacaagacagtcgcctcaattgagcctggaaataactggctcactacctacactgccctcgagccttatggattggccgttattggaggtcgtgccgccagcattggtgttggtggctttgttttgggtggtggaatctcctatcactccaacctgtacggatgggcttgcgataatgtccacagctttgaggtaagaatatacatctgtcataccttttgccgaatgaattactaacaaatcctgtttaggtcgtgaccgctagtggtctgattgtaaccgcgagtgaaacttcccacgctgacctatattgggctctgcgcggcggtggaaacaactttggccttgtcaccaagtacaatatgtacaccatcccctcgccaaagctttacggtggtgccagaactttcctccagaccgagtttcccgaggttatcaatgcttggatcaacgtgatcaacaatgccaccattgacggcaaagcccagcaatacgtcgccttcctccggacccaagatatgaaccttgcctctgctgagttgacctacgtgcacaacgaccccaaccccgaaatctacaagcaatacagaagcattcccgccatttccgacacatctagtgccaagacccttgtcgagtacgtcgagtaccttgagagcgagaacccattcggtcttcgcgaggtgtactggcctatcagtgcggctctcgacgagaaatttgccaactgggtggtggatctcttctactcgatgatctctgaggtggccgatgtcgccggcgcccagcccgtgctcatctaccagggaatcaccgaggccatgttgaacaatatgaagaaccacggcggtaacgctcttggactcgccggctcatctggccctgttcaccttttgcacatttcttgctggtggacgaacgaggctgatgacgagactatctacgcgtttgtcaacaaattcatggagaaggtcattgctgaggctaagagcgtcggagtcttcaatgaatatgtttacatgaactacgccagcatgttccaggatgctgtcgctggatatggtgctactaacaaggctcagctgaagaatattgccaagaagtacgaccccagggaggtttaccaaaagctccagcctggttacttcaagcttgatggtcctcctgtgactccatctttctagatggacttgacgagaaaaatgtacatcatctaccgcgggatataactgtatgtagaatgcatcttgatgatagcatattatctatatcataatttaatatctgtgaattatatacatattgattatatcaggaggcttgaaggatgttgtagaaaaaagaagcggctcgggtagaaatccacggttccacaaatggaaaccctggttccatcccgacatatccatgggtcatggtcaatttgcatagttaatgatggggctgtacgacgtcgggatgggtcttgtttcccgggcggaaagtgtcgggcatacagaagggtttgaggaaagagtatgggggccagtcatcgggccgaggtggttgctgccgtggcgagaaaatcgagagaagatgcttgattctagcgatgcatctgacaaattcatggaggttgtaaagctctggcaagacgtccggcccaacgcccatatatagcctcgatatgatggcccgggattttggtatcgggattctgcgtattctccaaatttctaaagtgaggctgtacgtgatgatcatcgcccgggtgtcctctttcaggtggatcccaatcttagttagcccagtcaagatgctccaagatgttaggggacttaacaggtttacgagtcgacattccccaagtgcgataccagcccctggagcacctcgcttgtccatttggttacatgggaaccagatcggcgaccatgactcgaaagctaaacacacagcttgcacttgccctcacgcaacgactgcatctgcttgtgtcatctagctcacaccacaatttaaggttgtggcaccggtcgcaggcttgccgcgagcgctattcggacatcccactccgtgcttttggaaatattcaggagtggatgggctgagaaatgcgagaagccaacacaaactggggtctatgtagcttgcgctgaaaaatggctcgagttgatggctgtgtctgacggtgtgaggaaacacgagttggagtctggaagctttccatttggcgacgtgtttctcccgtctacccgcgacccacgtgctgatctccctttcgggcggggtgtacctcgataactaagaaatctacagcgacggaactaagcaggtcagacaactttcaatgatattctttagcatacactttacatctatatatttagcagcatgcccaggtaaaggagaccttcgtggaggtatcacacatgtgtatcctgtagataactaagatattcctagttaggaaagtccgtagtcggaagaacctggcattagtcctaattgggaccactcggcgactttggaccaatcacaggcccggattccctcgaccggaaaggggaacatctatatccatggatatgttgtacaacgagaaacctcccccaaccttcagcgtcggcttgttgacaaacgcgtcgtctctaactccaaaccaactctcggtggcctacttttcaacgtgatccgactgttactaggatattattttcttcgttcacaacatacaacattggcgtgacttcccagcatgccaaacactttgacagcatcgacactgcccattgaggacaaacaggggaggggatggcgcttttgggcgatctacctctcgctttgtgtgtcaatcttgttagctgcggttgaatcgacggtcacgtccaccgcgttgccatctatctccgatgaattgcatgcgggaaaggattatgtttggtttgtcaactcgtattttctcaccaggtgagttgaaagatgaatccaaagacttcgaggaagctgatctgactcttcgggtttcaagtgcgtgctttcaaccgcttttcggacagactgcaaatatcttcggtcgacgatggttgatgatcggcgcggtggcatttttcgtacttggcagcggtataagcggtggtgctatcaactctgccatgatggttgctgggcgagcgattcagggcattggtgggggaggtatcaacgtcctgatcgagctgatcgtcagcgatttggtcccattgcgcgaacgaggaaacttcatggccatgatcttcgcggtgttctctattggaacatcccttggtccgttcgtcggtggtgctctagtacaacacagctcctggcgatgggtcgtgagtgcttaatatacttcacaccaagtcaagctcacctagctaacccatgcatcaacaatcaacagttttatctaaatctcccaattggaggaacggcactcgttcttctgttctttttcttacacgtcaactacaaacaagagccctgggaggaaaatatcaagaagatcgattatctcggcaatgcactactaatgacgtccatcgtctctatcctactagccctcacctgggccggtaccgcctattcctggtctagctggcgcatcattatgtgtctggtgctaggatttgttggcatggtcatattccacatttacgaggccagcccttggtgcccagagcccatgatgccaccgcatattttcggcaaccgcacctccttcgccgctctgattttgtctttcatccacaacatgctcaccttctgggtggtctattttatgcctgtgtacttccagtcggtgaagctctctacctcggcccgtgctggtgtgcaatttttacctaccgtaatccttgctgttccgactgctatagtcggaggtgtcgtcctcagcaaatggggcttctataaaccaattcacatctttggaatgggtctgtcccttgtggggctggggctcttcacactccttgacgcagactcaagcgatggaaagtggatcgtctatcaaattatcaccgccataggtctgggtatgctgctcacaacgatactgcctgcagttcaggttggcctcgaagaaaaggatgttgggctagccacggctacctgggcatttgttcgtagttatggtgccatctggggaatttcaatcccggctgccatattcaacacacaatttgggcgactgtcaagccgcatatcagactcttctgttgctgcacagctgggaggtggagaggcatactctcatgtatctgcaaatttcatccggtcccttgagccgcaagttcgcgacgaggtgataagtgtgtattctgatactctgaagctggtctggcaagtgtctctgggatttgctgctctaggattcattgtcatctggtttgaaaggcagatcaagctgcgcaccgagttagaaacagagtatggaatccaggtcccgaaagaggacaaagacaacaaggaagctgttgaggcataggcagaacttcaatgaaagaattcgtctatggccatgggggatctgctctcggatattgctgtagcaaacaatgccacagaaaattatttcggcatcgccttcttaccatatgtgtaatatcatacttactttgtcttttcttcccactcgcaaaaatgcatatcctcaatttcaccacccttatggttctcatcaccatgtactgtgcattcgtctccagccatccaagtccgacagatctctgaaacaatgagcctatggttatggaatcacagttacatcccacaggcaatggcagtctcataccagatgaggctcttcaaggcaattatcttgcagcaaggaacgacgatatggcaattatgatgttgctaattccgggggaatgcaagacggtgttgaaaaaggccattctagtatcgaaagcggcatttgagtggataaagaaaaaagtctgtgaagactataagtgcaaagtcgcattcgcgcctacttatagaaggtaccctgatcttatcaagaatcacattattatggactggatatttggcactatgaagagaaacgaccatcctattcagaagcttggcattcatccagatgagatatttgacaggatcgttaaaaagtgcatcgagggagatttaaagatcatgggaattaaaaatgtctgttctgccagccaagatagcttcaaagacatcaaatcatgcgttattagcaaagtgatggagtatgtaccccagaagacttcataggctaggaaagcatatataattgcacttcaaaagaacctgaacctggttgagaagacaagccacctaataagggcagctgtcatagttgagtcttatatttctttttttcaatgacttggttaagctgataaatatatagatgaacaaacccgttttcaagccgaattggcgcaaattggtatctgatttcaagaacaacaaactgtgtgggaaataaagacatataaggcgagtgctaggaaggcagcatgaataactacattgcacagttgctggctattgaaaacagtctgtttaggagaggcaagggcagatgcaggtatatgataaaactttctattctgactactcttcctaaccattattaggttaattatgggcttatagttatcaaatcatagtacttcaacatactactccgtatatcaagggtcattcgcatctcatgcgacttgaataatatatcgaaatgtgatttcttatttttactttagtttatctatttattaaagaggggttcttaggagaggggcaccgacagccctgcctgcgaaacaggtgtgagagcagagtcatcactgggagtagtagggtgctagagaggagaagtggaagtctgcattgctatctaggcctcgggagtgcttttatgccacatagccgcttagtcatcttgctctggaaacccccactgcattagttagttaacagctaactagttagtcattaactagtaaaagatctcaccaaggaataaaatattctctccaatgttctccagtatcagcctctttgaacttgtcaataccaccgacaacgccgtcttggtccacttgccaatcacccatttccacccgttcagcccagctttctaaaactttgtgtagatatgagctacgcgaatcccaaggtaaataaccactatagccactgaaaaggtctgcctggtaaagttgatcaggccgttcggttcccggaaacctagcatttttgaatggtataccattgctacctcgagcaaacccattgcttccaatgctgaagggcagcaggagtcgactctggttaccagattgccagttgagatttttgtcggttggttctatgtacaaaccagatggaatgttctctgcccttccgtcaggaaaccagggccgattcaagggcgacttgttctccctctcccctcgaaataagagtagagggtataatggtatcgcctggtcggtattatgcaagcctggaatctgacgttcggcaagtggttgatttgtaaattcgaccggattttggagtcgaataccgggggcaatatagcgaaaggcgagacgccggatgggaagagccgagagaaaacattcgataaacgagcccgtttctatgaaagatgccttgataaccagttcggagtatgggagagctattccacaatcatacgtcgaatgtatcaaagttgatggaagtcgaatctcgatagcatcaagaagacgagtaaaggcactgactgccctctccacatccattggggtatattggtgaatctcccaagggaatactccaaaaaaatgatccacagattcctttcgacgatccgaatatgttgtaattttgccctcatccaacatgtctagataggctttcagaatgttttgtaatggccgccatggccaccgttccctatcagaccagatcatatcttcccagactgggacaaaagaggcaagctcagtttcttgatcgaatctatctggcgtataagtattcgtcttccctcaattgtactaaagcataaaaggactctcacactatcccgacttcttcgtcactctttgttcgtgttgagggatatagccacacataacgatcaccccacgatccgagtgaagattccggagcaaaaagttcatgttttccatgaagcgctacgaggtaatagaagagatgaaaatttgaatcagggtcaaatatagtggccttcgccgaccgtaggaacctgaccaagttcggattcaggcgggatgcgagatcgaatggaattggcgagaactcttcccaccaagttctagacgggatcgaggcgacatcccgtccagccccaatccatgcctgtttaaggatctggttgtgaagttgggccgataaatgggggtcaaatgtagtgaatgacatattggctaagacgtaggtcttgagagacgccaggtcgatcttaaagtaagaaataatgcattcaactaaataagtaagatagatagagaagatagagagagaagaagcaggttgcaaagtgggaagcggcctgcttatatggttgatctttgcaaacaaacaaataatgcaaacttcgagcgctcgcttaatctcgcctagaaagcagacattgcaattgtgacagatcttcccggacctcgggaattccggtgggagatgtagaacgagcggagcggtacggagtacttcgacacagataggcaactacctctagagacaattttcgaacatagcacatagatgagctgtttctgccctcttctgatgcatcccctagcatcgtcaaatattcaactgctccggcacagatactcaggactatacgggtaatccaggtagccagttttcgtgagacacgtatagaatgaggagcgatcgtatttctgtagggcgatgccattcttcatccgaaaagggagatcgggcgtggaggtgaagtatctcccaaatccaatagcaacattgtcatagtctgcatacaccatttcaatcacctctggggccgacgtcgcatcatatccgcccgccaggatcactggcagggacctcccccataccttgacaaaggtgaggtggtttggatcagggtgagtcgtcatttggtccaaccaccgggagttggcgaggtgtaagtacgcaatgccgagttgtcgaagctgcaggatgaggtattcaaactggggaaccaggtcacccatgatacccattccggaatactggctccacggggaaagcttcatgccaactcgatccggaccgattgcattaattaccgccatggtaacttggagagcgaaccgtgctcgattcggaatgtctcctccccactcgtcggtccgctggttgcacgaggcctgcgtgaactggtcgatgagatagccgttggcgccgtggatctccaccccatcgaacccgacctcaatggcatttcgtgctgcttgcgcatagtcagagatgtacttctgaatctcctcttcgtctagcgcgcgtgggggctggcaccctggctctgccgcaacagcactgctcgacacctgttcaaaccctcgggatgcgagcaattccgggtcggcagatcggccggtagcataaatctggcagaagatataacattctttggcatgaacctgggaaacaacctctctccaagcttcgcattgtgtcttactccatatccctgggatatgtgcttcgccaactgagtttgggcaaatattcgtcgcttcagtaatcaacagagcccccggatcagatgctcgctgggcgtaatattctttcacaaacggcagaggcacagcagcctcatcagctctatatcgggtggttggcgacatgacaattcgatgctggagctggcattttcctagcgccagaggcttgaaaagcgttggagacgggtgtttggggataatggtcatagtgaatcctaggagtgtctgactcaatgcccccgggagaacttgacgtgagtaaaaaaccagaaacattgctttatcataccttgtagatgagattcgttctttgttgtccctcacttatgcacgagaattgaattccttcgacttcgcgttttgaggcaagggcgccattgagcagcacattacgcgtctaccaatcctaaagcaagaaagaccggtgtaattgctgcaatgtcacgagccaaagcgaaaaccaatctacccatggaaacctgaccgtgtggtgtagatgtatgttcatgtaaagggctgtgagggatacagcgtcgatcacacaagagcggtctttgttcaaatgaatagagcacgaaaatgatgttcaagaatccaacacagccatgtattccaaacagagagtgtggaacgaggcagggatgatctcttggggaaagtccgggcttgatcccgcccgtggaggggccggcgaaggagggggtgtgtcgttgaagcaagggatgaccaaattggagtataaaagtgcactttcatcctttcctggagagattatcctcattgtccccattgccatattttcttgtccatctcaagagccttctcgttcagggcctctgcctgatctggaatttgtcagctggtcacaatatataccagattggaagccagcaaacagcaaatcgaacaagatgagatcaccaagtctcccgcgactgccagtctcagcaagacccgaggccattctcgatatttacaacgattatggatgtgtaattatcgaggggcttctcagttcatccgaggttgcctcaatgaatcaagagattgatcctggactggcaaaacttgctcccggtaaaaacggggtgccgttggaagagttcctgggcataaacacaaagcgattgccactggctccaaatagccgtactttccgcgaggtgattctggagaatgatctgatgcacgctctgagtgaatcgatattatgtgacagtcctggggaagggtatcatatcaactgtgcacaggtgattgagatcggacccggtaacgcggcacaaccactgcatcgagatcaaagtgtatggcctttctgggacctgattccatctccagcaccggaggcttgcatcaacttcttttgcgccttgaccccatttacggaggccaatggcgccacaagagtggccccgaaaacgcatcttgatgtcgacctaaacaacttgaatccgccccaacttctgccagttgagatcaaccccggcgatggatttctcttttccggcagacttgttcatggtgggggagagaacaggaccaatgagtaccgtcgtggtatcacaatccacattgcccgcaagggcctcatgacggaggaagcacatccactatcaatccctcgcgagattgcagagaccatgtcttacaggggccaggcgatgttcggcttccgaagcaactggccgatcaaggatggacccgttgggacctactggtccagtaactttgacgagattggtggccatttaggactaaagtctagctagcgcagaaaatttacttcatttgacgtattggtattctgtcaggtcccaccttaatgcttcggacacgttcgtattttacattgatacacgacccgagtttcaaatcctgtctgtcttaggttttcaagtcaagttgggatgaaatacttcctttttggcattatctaggtagtataatatgacgctgttaacaagatggttctccctctacaatatctctaatttcagttcgatttgctcacactggggcctatagcatttggatgatattatcggtcgtttgaagagaatgctgtaaatacagaatgaagatgaaacaagtcattctccatcccgacccatcaaccagcgaatgagatcatctttgacaagtgcttcaagatccttcgcaggtagcgtgatatgaacgtcccaacctgcttccttttggtcacaagtgagtcgtttcgggagaaaaatgacatcaccctcaatcaggccgaacgaaagatcgaaattgtggacaattccaaaactgtcaccaaaatccagaccataaatatcaagatgtcgccaactagaaaaagcaaggtcggtaaatatcatgccggtttgactccaatccttctggtttgcgatgtatgtcatgcagctctggaaatattttctatccatgtttcgtactttgttcctcactttgcacgccaaatcagtcaggaatcggagttggtctgtctgaattgggcaatcgtgggttttcctgcaagacaaacactgctctggcccggtatactccgggcctggagtttttaatcgaagattacatgccatgtttcccagaaactctcttgctgcggatagctcgatccgaccgcgcatgttgactgccatgcataagtctaggcagtcatatgtcttgctttgagatttgaccctttgtattgcgtccgcaagagccgaagtcaagacatcattgctcgacaagaagggtggaagatcagcgacaggaatagacgcactatttggctggaacatgcaggcgttctttaagacttgagaacattggtatttgagctgcaaaattcgctcactgttgaattcaaagcgacatgttctgagcgacgctgcgtcaaggggaacggggtgtattgccggcgcaggaccaagttctgccgtgtgatcttgggcaggagacgtgtctgccagtcccgcaaatatagcgctctgagctcgatcttgctcgtcaatgatgagcggcagcggggtaactgatgggtctcggcagcatcttcccagtaacgcaaggatttttgccgcgcctgttccgtcaaaaacaatatggctgaacgtcatcgccagcacgattgcatccgtgaaaatatttgcctggaaccgaatcacaggctgtctttcagtcgagggaataagcggtgggagcggacaaagatgctgcttggagtcagatgtctcaagcattgacatgccactctgcacgcctcctaacgcgctttccatagggaatgggtgatgcttgtgtaccaggattgtacggtcttcttttgtacatggtatttggacactctgaatgttatattttccatcgagctctggattaacgacgatgtgcccgagtagaaggggaagcacttttgtcaaacgtgtgatgccggcttccaacagagagagacagtgcgtagaattcgctgtctgaaaagacaatagataggagacatatgcctggggcgctatgtggtccaggggactgaggatcactgagtgatcaaaagaggtagacatgccggagtaagaagcttcgtttgttacttatgataaaaggtgaataactttgaaaatcttgctacatcacggcggggggaaggaattattatctagctgaactcattagaaccatgtctaagttactaagacctacattcaatacactgaaataggtacttttggccattgataacgccccttgcagatcatgcaccaccacctgtgatggcgaatgcaaatcgatatctagctcagcagaccgtctggtaggattgcatagctagctcataagtacgaaatacatgcatcaatttaacactagtctcagtaattactaagccataaatacagggctcaaaaaagcacaccgcaatttcatttcctcccttatctgtgaattctgtgagctgggcattgcttccgagctgtggtatctaagtatgatgctgagaggaagtccatcgtagtcacgatgcagctcctgtccaaagtagcccgggtccgtctccagcaccgatgaggtaatcaggcaatgatcgccgaactctgacccaaaggctttagtgcacacttcgtgtagaagtggttgttgcatgggatatatgtggaaggtcttgctaacagtgaaagactactgagctgcctcatgttcgccaggtagccgtcttgcatcgttttctggccgaattcccacattttcttgcattaatccaccttactgtcgaaggctttgacctgctcatcgatgattagggctctgtctgcttgaagaatctggaacaccttgaggacaggctttgtcatagtcatgggtgatgtggtagatgacacggaggaaaggagggttgggaagtatcagagaatttgcaaaatggtatcttgcaatttcttagaggtttacctttccatgtggttgaggcaacatccgtcagtacctttgttttttttttttttttggccgcgagccgttttattatattatatcgatcaagataaagacgaaatggagtggaggcctcgatcacatttccagactggtagttgaagactctcgtaaaacaaaaaaagaacgagaacaacaagggtagagagttggctaagcccagacgtgcttctcatgctctgctacatccttgaaataccgtggggggtttcccgtcacttccaccacagaattgttgagaacttcttgtgggccattcttgacatcaacttccatggccgaaagcatagctgcaaagtctgcaggtatccctgccttttttactaaaagttcagcaagtccagtttctgtaaggctgcggtggatgatttttttgcccaaaattgtggtgagaatctccgccacctatgtattattagcgtcaaaaggatttatctacaggtattgagttgggatagagtcatcttacctgcccatacgataggagctctggacctaaaatgacatattccgtcttgtgcgatccccactcagtcaagcaatgaaaggcaacggaagcaatgtcgtcggctgagacgaatggaatcttaccatctccagtcgcggttatgatttgattttcgttcttaatccactcgcgagagggatcttctaatagattctctagaattgaaatcaagcttagccatattatcgtttaagattatagcgtagaaaaggataaatcgtacccataaaccatgttggtcgtagtgccacatactcaacttctgccagagagtccagatatgcatggacctgtcccatcgagtgtccacctttctcaacagtactggcgctgagaaggacaaatctttgaacccctttagcgcgagctagatcaacgaattcgatcataggcggggctatatccatgacaggaggcccaactagataaatggacgagattgtacccaatccatgcttcccggcctgttcgaatggtctctcccacgtatctcttttcagccagttgaactggctggatttataggggtcagagggagacgccgagctagatccaactagaaatggagttttggcttggtccagaagtgccgcaagacgactggccgttttaccccgcccacccagtacaagaatagtcatcacgaaagattcttgggtgcaagtttgcaaggaagacggtttgtattacttccatcgaacttcagcggtgggggtatatatgttaacttcatttacgtcgaacaacaagaatccagcagaccgcttatgttaaccgaaacgcaagatatgactacacgtattaccctataattgaaaatggcatatccaagaacagaaaccgatcttccttgctttagccttccaggatcatggtctcgtggatattggcagtgcccccgaggtgggccgagaaggggttgcatcaaatatacgcgtcctgtcgctgtgccctgatacagcccagcgcccactggggctgacggacattgatgcccaattttgaagatcgttctaagtgcagcaccagtgcatcatggattctaaccttggaatatcggttctcgactacctctgtaagaatatataatgagcaaggggcttattgcagtttccaatctccttttttccatcactaaatacatctcgataatttgagacctgtcacataccgtatccattgtcgaaagtgttgtttcgtttaccgcatgcaacgactgatcctccgaatactgtgaaatgaccgtttacgtagacccatcaaaaagtgcagcaatgtcatcttcataaagctgcagagtgggtaccctagctagtgtccccttaatagtccggacaaatggcttgtccttccgagcaattattgtcagtttcggttccagtttgaggagactcgaatcgctgattctggaaaggtacggttctaagctctcaaagaaagaacgccgcccgctttccgtgtcgacattgaccccgtttgtaatctcaaggagaaggaccagatcggagtacccgttgcctcctatcaaagcagcctctacacgcgggtgttgctcaatctcccgctcaaaaggagagacaaagtatcccttcgcatcggtgagggaaacgaagtcatccatccggcagacaatcttccagagccctttacgagtaggatgctgaacccacaaatccttggtctcaaatctctctagctcaggaaaggcaataaatatcggctgcatgacgcattctggtcgacggacaaacaccatttcataaaagtcatcagcccgatgctcaaactcgacgcctgcatgtggctggaacttgaagtaatcccagtcctctttgtcgtccggccgtgtctcggtgaaatgatgtcctgactcggtacagccaataagaggggctaacttggtgtcagagattatttgattccccaggtggcgcgccagaggagcgccggcatagtggacatattccaggcttttcaaagcttctgcgccatccgtgaaagacaacatctgactcaacagtagcggtgtgcatatagcaccgtccgcgcgggcatagcgcaagatcttcgccacgttttctggggattggtcgggaggtggaaggatggctgtcatgttgacgaatggggggatgaagagtaccgttaccatccccacatactaccacggcgttgttagtacacgagacaaatgctattaaaccagacagagctcaaaactcacatgcaatgttggcaagtgtgtataccatcgtttgttagcgtattgatgaatatggctctctgcgacatctggcaagcttgctggagcttctagattggccaccattcgaaatgtatgggtgattggcttaggagggcctaggtgaatatttattgtgattaggcggtccctctcttgatgaacgaaagaaaattggctcacctgttgtgccagagctgtgaaatactagccatgggtcatccttcgcgtcatcccagggcttggtgtattcaattgcaatcggctccgtgtctcggaataagtcatcgagacttggggcatccatgtattgaatttctggtgcatgctcaagggctgctttgatgtcattggctacatgctttgtacttaggtagacttcacactctgcttttcgaagcacgtgtgcatgattttctggcatcatagacaggttaggaagaatcaacttggaattctgttagccgggaaaaagaaacgggaaatcatagacataccttcttctgtaactttcctgctgcgagagcaagaattggatagcgaagatctttgggtccggcatatgcaaaacattgaaaagaccgcgaagatggaggcagattgtgcaaaagccactgtgccgcatgattggccgcatcgttcaattgtttgaacgtgatatctctatacccttcgcacacttttccttcgtcaaccgggatcgaaatccacgaactgtttggttcgtcacgcgctcgctgttcaatcacagatataatgatgcgctttccatgctggacgccgggaaaaggcagatgcgtagactttgcggacattttaggttttctggcgcagacaatgaatggaaagtgcgctgcttaatttaaagcttccacaaccactagcttaggtccgacgatcgacattattgcgtcctagctacctaaatcagggagcgatcttgcatgaaccaagaccctcatcgcgatacaatctggtttttcttttgaaccattgcatcatcgtatgtattaggtgggctgaaattctggagccaacttgccgatcgcgttcccgtcggcccttcccatcttcgcaatactagatgcgccgtgagatatcaagcccatcttatgcaagaattaattattgaacttcgtcttgatccgcctttgaaacaatcgctagtcatgggactggaattcggacgaaatgagatgtgttccctttaactgcaggtgtctaaatttagaggtaaaaggattgacagtaatcgaggaaacgatctgcggtgttcgtgtgtgttcgtgtcgatggttaccttcagtggtatgaaatggtggaccaatttcagcacgtgatctgactaatataaagtagcccagtcacgtggtgatcggcactaaatcacgtgcatctggatcctcagcggcctctaagatagaattcaaagtctctctctatgacaacgaataacatctctaattatcaatttcctctatctctaaaaagaagccgaaaccttaaaacagccatacggagtactaactatggtgatccccatctaacgtctatcatccggtcgtcgccgcttaaggcacctcggctgcaggcggctacatacggctccagacggcctcggccggtttcgggtggcttcaggtgttagttttctccgtgataggaaaccttgttttcgcaatggaagaatagccactacttgtggcttgcctttctactcctactattctcccctttcgctcttacacctcttcaagtctcttccaccttcctgacattgctcatttactcaactcgactgcaaccatggacataactggaatgtggtgaagctaggccacttcgatagcctgaaaatcggggcgttttgccacttcgagaaagcaattataagcgtgcgctaagcctttttggcaattccgtattgaattcttggcatatttccacatgataacaagccattcctaggctcctaaaaggaaacgaggccctatcgaggtaatgcgtataggcagttggacccgtactaggagtccggagagttttaagccgggatgtacatatgcgaggtatcgaattcccgagagaattcttgaccacttaaagacatgtagctggctataaggggaatcctcagtaaacaaacaacacatctcagcactttacactcaccagtgagagtttggataagacactaatgctcgttctcacctatgccagaaaggtatcgatattctcgtgcatgtcttcatcttctgttatatcagtagctcaggggaagaatgatcgtgttagtcttgctgcagcctgaaaggggtgatgggtcacgtggtgattgtatggcgacatcttcgttcagtttgatattcacatctgaaattatgacaccacaagaaggggcgagtgcgtaatagatagggagagaagaaggatgagagcgggtgaaattatccacaacagtcgcgcactgaccctctctgttgattgccagatacactcattcgcttggcatctgcacagaacaacctctcagcccagccgcggaggtgggttaatgctgccttcttatgtcatcagtagtggcatctcacaacgtagtcaagggttgatatatccttccaactgaagaccttttttgtatacaacgagctacaatatacaaagtttccccatgatggagcgcgggcggggcctcctttgaccctacggtctagagcatcacagcataaaaccggagctagaggtgacccgttgcggctaaacatgcacattactgtccctcttgactacgtaaggccatcaaatacaatgaataagaccaaagcaaatatggacagccctacattacgattcatttatccattacggagtcttagccgcaggttcagctggtggaaactaatcagtggctcactaatccgatggtttgatccaacggggcgcaaaatgtgttctaacggggcgtaaaatggtcagagaaactgctcgagcgcgggaatcaaaggagtcgccgtcttggcgaatgcggttatctcatctcctggccaatggtgagagacaatacaagccgacgttgcctccagagctattcgcggcattgcatgataaagataacaaagataaggaagccaattcgacccaatgatggcatatttcccggggccccgacgtcttccttcaggtgtacctcatcaacgtcgccgatccgagcaataggcaaccagttccttctgttgataggacagcacgtcgaactcctctcccgtagccaatcgccaccagaccaagagatatacttcggatcctccgtttaggggggggggcatgtacttttggctttctatagttcgccacttggcagtttcaactcgatcgaaacctgataacgttagaatataaattgcaatgtccccagatcttctctcggggcattcgttgcaacagcgatctttttcatccttaccttctatctctcatctcgggtctcgcacccattgacacgatgtcgggagttgaaaagcctttaagcgacaccaaaggtgtcccaagcaaagatgccgaggagacaattgtaggagaaatctatgaggatggcgtcgaccatggcgcagactctgggctccaacgccagctgagctctcgacatatcagtatgattggtcttgcttcgtccattggtatgggcctttggctaggatcaggaacatctttgaaaaatgccggtccggctggtattttcttgggatatatcctatctggcaccatcatttggagtgtcagtcagagtataggagaaatggcgatcatgtatccccttcctagtgctgtgagtttggtggcttctctcttgccgactgatcattactgacccggccccgctagttcgtgcaatggactaatatattcgtcgatgaatccgccggtttcgcgctcggttgggcttactggttctcttactggatcaccattgccaacgaggtacaaggagctatcacagtactcaacttctggacaagtgccgtccccactgccgctttgatcactatattctggttcgttattgtcctgatgaatgttggagcggtcaaatggttcgccgagatcgaagtcgtggctgccgcaatcaagttcggtttcatcttcgttgtaatcatctccggcattgttctttccgctggcggtgggcccaagggaggttatccggcgagaccgggaggcactattggcttccagttttggaacgagatggcgtttatcaatggtttcaaggggttcatctcggttatgccgacatgtatcttcgccttgtctggatcagaaaatgctggtctagtcgccgcagagaccagcaatccccttcgatctgtgcccaaggctgtcaagtcgatctgggtgagattgagcttgttctacatcctaggaagtttgatcgtcacgatcaacgtcagcccaaaggacgaaaatctgttcggtgcatctggcaccaattccagtcccttcgtcatcatgtataggaactctggagtggctccgctagctcatattatgaacgctgtcattctcgtctctgtcctctccactggtggtatctctggatacgctgggtcccgagtactcgttggtctcgcacaacttcgcatggcccccaaggttagtctggttcttttaccccgtccgagagtactgctgacaaaatgcgaattttccgtgtaggttctacagaagaccgatagctggggtcgtccatggtggggccttgcgcctactctcatcatcggaggtgggctggcctacctgaacgtcagcaacggtggtgctaccgtttttggctggttctccaacctgacctctctattcactctcttcggatggggcatgatctgcctgtcacatatccgtatgcgtgctgcctggaaagttcaaggccgctctgtcgaagaacttccttggaaatcaaaggtcttcccttgggctgcctattggggcctgttttggtgtgtagcacttatcatcatcgagttctatctggccgtgtcgcccttgggtgacaaacccagtgcggagaacttcttcgccaattacctctctgtggtggctattatcattctttatattggcgcaaagattttctaccgcggtagaagatggaacaaactcgaagatatcaaccttgatgcttgtaggaggttctatgcaccacgggatgaggaggggaagaatgagaagagcttcgccaagaagtggctcaagtttccaaccaagaactgaccagcctatgggaggttatgtataaatccactccattgttgggtattttagtcagatttcaactttccaaatacatatgttgtatattttactgaactacttccgtttcatcctccacctaatttattttggggattgaaccaccaacccccctttttgttaattcgaccccgcctgcgccatatctcaggcataaactgaccgcctactagaactgttcaccgccttcctggccgctatgcctacgatttgtatgtttgcttgcttattgctgtttgtatgtttgctagatttctcagcgagaagttcgaagcttacaacgtttgcaaagggtcaaccatataagcaagccgcttcgttggtggttcaatccccaatatatattgcaagccctgttgggtaagtacgactagattgcagaatcgcctcaactgttgaatattaacaaatgttgcttcatgcacactttaaccaagaaaaacgagaattgatttcaccaataatctagttcaaatgcttaatttcgcccagctagggcaaaatccaatcagtaagaacgtattgccttactataacaagacgagttgatagcctggattatgaagaatgaagggtgaatgctacgagtactgagcgatatagggtgcacattctttattgcatcattaaagtcacaaccaaatttaaagcgttactagaccgagagccttggacggctgtgcctgtgaccccagcgagaatgccccagcttggcaacatcatttttctcgacaactgatctaatcctctgctccatccccctttgctctctcggatacatgatgaacctgacttgccctccttaattcccgatcaagtacctcagtcaaccgcccaagcagccactgaacctcactcgtttcggcaagcaaaggattctcctgatcagtccaactccattcccgtgctgcttgcgcctgtccatcattggcttcatctccaagaaccttgggtttattatctccttcaatcaggctcatataatattcccattctagataatcgaatttccgggatggagtgttgctggcgtactcaataattttgcgtagctctcggaagagtaggtagatgtactggtggatgttttcggcttgcttttcttccttgttgttcttgaagtcgaagtcgttgccgttctctttattgggatcttgattttggctgaattgtgcgtgctgttgtgcaccttctttttcgcccgtcgtttcctccatccaccatctgacccaggagatgtgagtcagtgtcttaagcctgtccacgaaggagtggtcacccggtagaatagtgagctcgccaatgaatagcgtaacgtcacgaataaatcggatgacggtatcgccaatattggagatgagaatagtaatcgtaggaacggcaagcagggaccaaaaaacgaagaaggatttacccaaactactgatcggatacaaatctccataaccaactgtcagaagacttgtatatgcaaagtatagagcctcaaagtacgaccattttgcgttcgactccgagcgccagaaaacgacacctccgatcagccatatcgtcatccaaagcaaaaaagaaagcaagagcgagagccatttgtgttggacgtttgccagcttacatacctgacgcatggctataaactctcgtttgcgctgctcccgctcgctgcggccttccgctttggcactcttcttcccgagcgaggggataatacccttagcaccagaacggtccgagaaggcttctctgagtaggtatttgcgcgtttgtgctgtcaacatgttgccaatcttttgcttgccattttccaacataagcgtacggatggaggatatgataagaccaaggataatgattcctccgattgcatatgggaaaagcaaaccccggccgagatgcgtacttggcgagaaattacccacgccgatggtgagcaatgtatagtctgcaaaatatactgcgtctaggaagcgccatccctcgaccttagagtagacggctgcaccgcccagaagatagaagcagaaaatgatagtttgcagcatgagtgttcgttggctcgtagtcagattgaattttcggctagagtagccacggtaggcaccatatccagtcactgccattaatgacgcgatgatgaaatataaccctgctgcgaatgtgccatagtaataactctgcgagtagattcgaccgttgttctcgggcttgtacatgttcacgccgaagggaattaagattgcgatcaagaacgccgatgagatgtaccaccctacgacgatgattggctgggcgatttcgaaacggatgcgtcgggccatggtaagcgagagggctaggttggcgacaagtgcaaagacaagtgatattgcgttgatagcggtgaccctgcaaccgcatatgaggttaccgggagaatcattcagggtatgtctgatcatattaattaccattttggatccgggatatctgtcccaccgctgctggtgaggtccattcgccatggttgtgataaagaacagatattgaaagcgctagccatcggcccgaaagtgccctgaaaagaataatgagaatgtggacttccaaagtaaaggatgacatagtaggtttctgcatacagctactagagggtatgccgtacttgcgagccaccaacgcgcagcttgctggtactcggtatcatgttgcgacaacttattgatttcgtctatcttctgatttggagagctggcggtgcggtcgagagccactgcttcgtcggcaatggcgtcatcgaaaccaggttcgttcatttcgtgcgtgcttgatacaagggaacctcgtgtactctgccgtttgatcacgacctcgcagctggaatacggaggatgggaagcagctagaattccaggtagaaaagaattctaggtagaaaggagagacagtggggacagacatcatatgcataattgacttcattggcgcattcaaagaccaagcaaggcttgtcgcaagcctagtgacgggatgtccgctatgattggtcgacaatgcggaggggaccgaataaaaagcaagatctgtcgacgtcataccacgtggcttccatgttttggcaattaccacggaacttctattttccgcagatcaacgagaagcttggttagggatattaggatcaacctcacaaacatgagtgttcggtcgacaatgatgacaagcacttcatccggtccgcaccaagctataatatgccgtacacacagtgcaattattccaagtttcttataattagagatactttcaccctacaaattcagaatttgctttaaaagcccttgcagctcttcagccttcgcacgtagtcctccacttagccccgcttccattaccatgccagtgccgacattccttccaaacatggactctataatgctatcgttggagctttgaatatgttctataatcttgtcagtcacgagtatgtggcaagaatacaagtcacataccgagatccttctcaatcgcatccaacgcatccagtaatatctgcacggcattgagaatccgcacgcacccgtcattcgttagaggtagatcacccagtcgcaggtcccaccgtagcccagctcgggatgatgttgacgatgtcgagtctggaagtatggtaaatagctgacgcaggtcgtggaacactatgtcatagatgttcaatagcgacatgtagcatgacaacatcattaagagggtgggtgtgtccacaaagtcatggctaccggggttgaaactgggaagcccggtccgcatccatttctgtcgggatacgatttctcgtagccattgcgcgagataggttgctccgccaatcgggtagtcgtagatgctgctactgctgtgctttctgtcgatgtttgctctgcggtaccgttgcaggtcgcttgtgtagtttgtcattgcgacagggatcaaagagaggccttggacttgggtggatggtattcggacttgggagttcgggttgtcgggcatggtgctgtccgtgtttggtatgttgagtatttctcttatgtgatttgtgtcggcttggttatagtatgtctggtctaacgagttgcttgattttgtaagatcgagctctgggctcggcgactcgggagagcaccaccattctgtctttcggacagggaatggcatacaaattggcatgactatctggtctcccggggtgtggaataacatatccgccagaatcgggtccagcgatggatcggccaggttgtgcgggtcggcgatgggatcgacacgggagatcgatggtaaaggatcgtcctgcgatgcaagaaagccgggagacttcaatggtggcgtcgatgcgtttgattctgatgagtatgtggaaggaatctcttccgtcctgtcgagcttcttgggctgccgcccactgcgagcccgccgactgaaaacgcatggcacccgagcgcgcgagcaccgttggcacgtgttaagccattcaccgtcagacgatggcacgcaccgcagtttctgtaatcgacatcgatcgcacgatgtgcggtacgactgtgtgggtttggcggaggctgacatattgatcgtagggctggtaaggctaataaggctggtcaagctcacgataccaatgcttggctgttctgatcgtcgtcaagatgtgatagcagtgcgtgatctgacgacttggctaaaattggcattgattgaaatcttaagattttccgtgtcggtgggtcagatccggttcttgtatatatgtttggattcgaagtggaggacagcctggaacccaaaataagaacggaccatggcattcagctgtgtagcgctggacagaacgcccctgcatggcgctatgaatatcgattccatagccaatctatttacaagaatcgccaaggcgctgctgtgatccttctgagtggggctaatttggctgcaggcgggatcacacgtcaggtcgcttgcagtggtttggtccaagccgcgtctgcgggtctctctcgctgtgtatataggctgttgagcatgtcttgaacagttcagcatgtaagcgacaacgtttctgatgtatgaatgtcgcaaggggaagaatatcctccagctgtgcgctcgaacggaacaagaaaatggcagcgatatcgctccgataggtttgacacttatgcagacttctacttcggtgatatggatatcgggacgggtgccgtcggctctccgagagggttcagaagtcagcagataccgaatcactctgacgaagtgaatgcctttaacccgatcggtatccttctcgcgagatacctctggccacgtgggtttagccatctgggcgcatactattcgggccaataaggctggcaggtgaaacgcacgcccagggatcattgccgttgttatgccgtgcgccatagtggcatgagcgggtcagcggaagaaggcgcaacggcatcccctgcttggccccagcccttcatggttacttcgcgtcttgaataatttcttctttcatcttgttacgaggacaaaacaaccaatcgtattgccaacagattggcgtatcatagcattatctttaaatatcttgcacaatattcacagcgtgactgtcgtccgactccggagccattctccgtaacggtaaaacagaatcggcactggcgcaaatgccagcgccagaaaccctagcagcgtattaccccacccgtagttgagtgccgaatacatatgcgacccggcaagcggcaagaaggccccgaacattgagcgaaggagaatgttggcccctagcgcagatgccgccgcttctgacccgaatagatcgaccagatacagctgggagggcatgatcacgaagaaggctccaaacccaacgatgaacgttccaaatatcggagccatccaatgcacctggtgatatgccgtccagccgtaaatgaacaacccaggaccaatgactggcgggaaccacatcatcaggaccagccggtactcgggcttaggttcctgaacattgtctactgccattttgctcttcaagatccggtcgcttagtatgccaaatgtaactagccccacgagttcgccaatacctaggccgaggtaggccagaccagaaatgccggcgctgaatccgtactgaccttcaaagaccatgctaaaggtggcaaaaaggagatatagaagtccgaatatgagagccacgtagatggacatgacaagcacgatcggcgaaaagatcaagagtttggtggggcgtacgagtgcagcgacaatgatctgctgctttgtaagaccgcgatcgagttttgatcggaggtgaaggttcccggttgtgcgtcgcaagtatgcggccttccgttccaatagggtgttaggatgtgtttcgcgcatgaagatgagcgttccgatacccgctgctcctccctgtcatagtgttagaatgctaaatactagatcagaacaagaccgcttacgaggatcgcgaccacccagaaggtccaccgccaatccttcccttcggcaacgaagcccccaatcaccggtcctagaacctaggtcagttagtatatttcgactacatagtagatgcaagttacataccggtcccagaagcgggcccagaccaaacaaggctgctgccgcaccgcgtttctcgatcgggatgacatcggcgatcgttccaccgcccagggaaagtggcgccgctcccgcgcagccagatagaaaccggaagaccagaaattgagcgggagtttgactcacggcgcaggcgacaacaaaaatgacgaagagagtattggaaatgtgatagacgacaaggcgcccgtacatctcagagagcgaggagatgacgaggggacccaatgcaaaccctagcagataaatactgacggcgaaggttgccaatgtcatattggtgatctccaggtccctggcgacgccctccattgccggagcgaccatggttgaggcgatgttgctagtaacttaattagcatggtcggttgtttttgtctcacccaggaaacgacttacacgaccatggacaagatggccacaatcacgacatgaccaaagcccttggtggcaggccagttgagggggtttttagggtcatctgggccgtcccagtcgaccacatcgtcctgcagtttatgcgacggcagcttggcagcctcctcgtctgccttcagctcgacatcaatccgagtccgctcggtctcatcattactagagaggttcatcctacagagtgtactcggtagtgggaccaaagggaatttgtcgtttaggacaagctttgcgcctatataataatagagaacgctcccaataattgcaaacggagatggatggaagattttctcggggattcaagtccatgggcgttggttacatgtcgtttcctccgtgttgtaaaggccgagctggcttgaagccaggaccagggctcggagattccatgactactcaaattgggtattctcagcgagaggcaaactattggatggtggtggaacgagtaacggagcggaggaatagacggagatagagagtcgtatatggaggaatccaagggaaggagagcaagacggaggaatgcacggcccttggaggcacatccatggatatgacaagttcgtccgattggtcagaatcctcgggagctgttgatcctccgcatattacccgcgccttacccgatatggttaggccatagcggacctcgggcgaatgtttacggcttccctttcgttccttgtcaatcaccatcggacaatccgagtacccctccatctgccatcattctcgtattgatgcatgctcacagctcctgatctttttatctattggctctgaatttcttccttagtctctatgtggcgatacaatcctctacggcgaaaacataccccacccattcccccacacgtgtgatggagaaccttgaccaggcgccgcctcgtttagtctaaacgacctgtgtgcagaggagtggtctggcccagcatatcacatatattcatacggtcgcatagctggaaaacgtgcacctgcatatccgcgacagccacaatggatcctccgcccgcagacgaacccaacccccaaccggcttccattaatcgtcggagcaaaccccagctctcttgtaatttatgtcgtcggaggaagtgagtgccaaacatctccgactttccgaatcaaatctgacagaattctccgataggctccgatgcgaccgcaaccagccttgtttgacatgcaccgctcgtggattggcactatcgtgtgcctatcccaataatcaagctccacaatcgcctagaccacatggggcccacagggctcgcccccaagcaaccgtccaggaccgtttgggtcagctagagcagattgtcgtttcgctgatgcagaagaccaccgatggccaagatcgaccggaccagcatccagtcgcatcagctccacaagatggcccccaagaagactcgccgggactggccattaatactgcagactctccagctcagtccgatggcggaagtgtatggtttagctcttcggacgcccagtatgtcggaggaacccactgggccgccatcctggatgggatcgccgacatcaaggagcagcttgaacaagaagattatgggaacaccgagaagcctgccatgctgcatacctttctgctgtatggatgtaaatcagcgagtaaagaagatatcttggcagccctgcccgatagacccgctgttgatcgctacatttcccagtactttaatcgattggacttggcgccatgtaagcccctgccatccgatatgcgaacaatgactaatacaggcattatactattcagcctgtctacacagtggtcagttttcacgcgaggtatgcgaaagagtttgccaaatagcgtgagtagaatgtggttctaacgacaataatgtagtatgaacggttctgggagaatcaagctcagacctcgatcatgtggctgggtctccttttctctatgatatgtctcgcagtgctggcttcaagtgcggcagactccagctcatccccaggagtccgcaatccgttggtggatacgtaccgcgaaaagatagtacaatgtctcattttgggcgagtacacaaaatctgggcgttacatatttgaaaccctatatcactacctgactatcgagtattccatccgaaaggatgccgaccgggacatctggatcctctcgggaatctcggtcaatatagctctgcgcatgggttaccaccgggatccatcgcacttgccaggaatctctccattcacaggagagatgcgacggcgggcctgggccactatcgtgcagggagatatcctgatatccacccagatgggcatgccacgcatgatcaaggactggcaatgtgataccgtagagccccgtaatctgaatgactcggacttccatgaggattgcaccgagcttcccccgtccaggccagagacggaaatcactacggtttcgcacctggtcgctcggtggcgtatctttgccgccttgggttcgattgtggatttcaccgcgtcggtgcggccggtggcctacgatgaggtgatgcgactagatcgcattctgcgtgacgcggaggcgacagtccctgcctacctccgcatgaagggcatggccgcggcggtgaccgatcccccgcaagtgattatgcatcggctcttcctcagactgatgttccacaagggtcagatcatgctacactgcaagtatttaaccccagacccatccgcatcttccaatgacccagtatcatactcctactcgcgtacctcttgcatagaggcagccttgggtattttggagattcagcgaatactcgacgaggaaaccaaccctgatggtcagctttatatgatgcgatggcgggcttcctccttcataaagcatgagtttctgacagccacgatgctactgtgctttctcgcgcgacagagcaatggtagcccgaatgctttgaccgatggccacgacttaaaccaaatcatggcagcgctaacaagcgcacatggtatctggatacggtcaaggaattcatcggtggaagcaaagacagcagcagacactctcagcattgtcctgggcatacactcgggtgattccaatatgggcgctgagggccaggctatgaacaataatttctccctgaattcaggtcagtcggccgtctttgtttctctagccagtccttgcttacgatagctcagccctaccgatacccttccccgctggaggtttcaatggaaacggtctggaagagaacctttattatgggttccctttcatggggtccaatcagatgttcccaggctcaaccctcatgatggatccgaatctcgcatggcaatggtaaaaggtgtgttacgactacaatgctccccgccacatctcactgacaagaacatagtattttgaaacggattacggcaggatagagtttggagttcggcgtgttgttgtattcggaatttttcggtggaatatcaccttagtgctgatctgtccaagcctcgatgagacgatcagtataccacgaagacaatgaaacctgcgtatataatgaacaaacttcctcgatgtcaatcaaatacgtcaacaatcatcttgtattctcagagctcctccctttcttcaacacggattaattgaaagacctgccccctatgcctgaaccaattgccatcatcggaaccgcctgtcgctttcccggcgggtgcgatagccccagcaaactctgggggctattgagaaaccctcacgacattgccaaaaaggttcctctggagcgcttcaatgttgataatttctaccaccccgaggcaactcaccatggcaccacgaacgctaccaagtcctactttcttgaggagaacatcgctcagttcgatgcgccgttcttcaatatacaaccgatggagagcgatgctgttgatccgcagcaacgtctactcctagagactgtgtatgactccctgtgcaccgcgggtctgcccatggagaacctccgcggctcgtctacggctgtctacgttggtatgatgtgcgatgattggtccaccatggtggcgagcgatgtcgagaccttgccaacctatacggctaccggcttagctcgaagtattgtgtccaaccggatctcgtatgtctttgactggcatggcccttcgatgaccatcgatacggcatgctcgtcgagtcttgttgccgtgcaccacgccgtgcagaccttgcgtagtggtgaatcttccttggccatagccgctggaaccaacttgattctaagtcctagtgagtacagactcccgaattgaccgagttgccactgatctctcaagccatgtacgtaaccgagacgaacctgcgaatgttgtcgccgaatggacggtgcgcgatgtgggatcgggctgccgatggctatgctcgtggcgagggagtcgccgctgtagtcttaaagaccttgagccgagctctggccgatggagaccacatagagtgcatcattcgtgagactggagtgaatcaggatggtcgcactaccggactcaccatgccgagtaacaccgcgcaaacggcgttaatccgcgacacgtaccgccgagcggggctggacatcaatgaacctcacgatcgccctcaattcttccatgcccacggaactggcacccaggccggtgaccctcaagaagcggaggctgtctcggcagctctatttcccaatgactcgaaggaccacacagagctctttgtggggtcaatcaagactgtgattgggcacactgaaggctctgctggtctggcctctttgattgggtcctcactggctatgaagcatggaatcgtaccgcctaatcttcactttagcgaattgagcgacaaagtcgcgccgttttatacgaatctgaagatcccaacagagcccatgccttggccgaagctggctcccggtcaagtcaaacgggccagtatcaatagttttggtgaggcgatttctctcgatatcatgttacttgctaactcttgtaggttttggtggaaccaatgcccacgccatcatcgagagtctcgagcaagattccgaaagaacattgaagcttcgttcggtcgcaaatatcactccactggttttttctgcagcttccgaaaagagccttcggaatatgctcgccacgtattcagtctacctgtccgccaaccctacgttagatctccatgatctggccagtacgctcagcatgcgccgatcgacactaccctttcgaacttacgttccagtccgtagcaaggaagggctacccaagcagttgaagaccatggcggatgccgccccaaatgagtcggagctcagcgttcgccgctctcagatcattaacccagctattcttggcgtgttcaccgggcagggagcgcagtggccacggatgggagcgtgtctcatcgagacctcaattttcgcccaacagaaaattgcctggctcgactcaattcttcaaaccttacctgcagaggaccgcccgacctggacgatcaaggagcagctgcttgctggtagcgagacttcccgggtgacagaagcggcagtatcgcagcccctgtgccttgctattcaggtggtattggttgatatcctccacgctgcgggcgttacattcaaagctgtcgtgggccactcatccggtgagatcggagctgcgtacgctgcgggtctcctgtcggccgaggatgccgttaggatcgcatactaccgtggcctgcacgcaaaacatgcatcatcaccgaacggcgagaagggtgccatgatggctgttggcgcttcgcatgtagaagccctggacatgtgcgccgactcacgcttcaaaggccgcattcaggtcgcggcagtgaattctagctccagtattacaatttcaggtgacgaaggcactattgatgagctccttgaggtactcaaagccgagcagaggtttgcgaggaagctgaaggttgacaccgcctatcactcggcgcacatgctaccctgtgcagagccttacttggagtccatgaagtcgtgcggaatacagccagaagaccggacagggcctgtatggctttctagtgttaccgagggacagagaatggccaaggaaattctcactgaaagctactgggttgataacatgtgcaacacggtattattctctggcgcagtggctcaggctgttttggaggctgggccattcgacatgaccattgaaatcggtccgcacccggcactcaagggtccggtaacatcgacgcttgaggagtttggatgtgaagccccctacacaggtctgctatcccgagccaaaaacgatgttcacgaactatccgcaaacctcggtttcatctggatgcatcttgggtccggcagcattcagtttgacactgtcgacaagcttctatctgggttcaaaggaaacagggaagtcctcaccaacttgccgtcatatcccttcgaccatcagcgtgaatactggactgggtcccgcgtgtctaatcaccacaaatttcgtcgaacccctccaaacccactgctcgggacgcaatgttccgaagcgaacactgcccatgagattcaatggagaaatatccttcgcccgagcgagatctcttggctcagtgggcatcgtctgcagggtcaagtggttttcccagccacgggttacgtctctatggccattgaagcgacgaagcagctcactattcagaatcatattacttgcatcaagatttacgatctggaaataggtcgcgcaattgctttcggcgatgatgcagccagtatcgaggtcgtctttaatgcaagcgtggtcgagataaccgagaaagccatcaccgcccagttcgcttgttactcaatttccaatgccgatggaaatgcagtcctgaatgcgaaaggcaaggtcattgcagatttgggtagctctagtccagggacacttgcaagttacgagtccaaccctttcaatctggtcaatgttgacccaactgagttttaccggtacctcactaagattggctatgattactccgagcccttccaaggcgtgtcgcagattcaccgcaagcctggatatgctatcggtctgatcgaggaccagtctggcctctcatgggaggataatctcacatttcatccgggagtccttgatactgctctacaaaccgctttcgcggcatggtcctttcctggtgatggtcagatctggtcccttcatgttcccactcggtttgagtcgctagttttcaaccctcacttctcccctcttgccctaggcaaagaacgctccttcaaatacgaaacattcattcgcactaatacccaaggaagcctgactgccgatattcacttgtacaccgcagatggcaagaactcatgcatccagattgaaggtgcatcccttgttccattctcaccgggctctcctaaagacgatctgccactcttttcaagtttcaagatgagacctgctgttcctgatgggcaacttgcggcaatgggcgagacgatttcaccctacgaagcgcaggtttacaaggacattgatcgtgtcgctttctggtatatccgaaatgtggcccagactattaccccagaagagtgtgatcagattctgccccatttcagatactatctgcggtggtgtgagcgcatgattggcatggtctctcggggtgaacatcccaaggtccccgttgaatgtcttaatgatgagagaaaagacatcactgaagtgttgagcaagtaagttcatgacttttatttcaccccaattcttcttctgcgcaatctcgaatagattattgattgtcttgcattaggtatgagggccgcaaagatatccgatttgttgaggtggtcggcgaccaccttgttgaagtcgtccgcagtggcactagcatgctagagtatatgaaccaggatgggctgatgctcgcggtttacgaaaatggtctggcagccgggccaaacaaccgctggctgagtcgcatcgtcgcccaaattgcgcatcgctatccgggaatgcatattttcgagatcggtcagtcttgatgcttcatattacattagctttcagcgcacaagctgactttctgtaggagccggaacgggcgcatccaccaagacaattttgcccgaagtcggctcagcctttggaacgtatactttcactgacgtgtctagtggtttcttccctgaagctgaggagcgcttcaaggactatgccaaccgtatgatcttcaagacgttcaacactgagttcccgccaagcgatcagggattcactgaaggccagtacgatgtggttattgctgcaaatgttcttcatgtctcggccgacatggagcgatccatgacaaatgtccgccgactattgaaacccggtggttacttgattaccttagaggtgacaaattgtgaccttctcttcagcggtatgaccgtgggaactctcccaggttggtgggtggctgcggagactggacgaccgtggggtccttgcttgacgctgcctcagtgggactctgtactccggcaaacaggcttctcgggcattgatactatgacacccgatctcagtgtatctcttcccgtcgcggtctttgtttcccaggccattgatgatcgagttgctctccttcgagaccctctttcattgtcgaccgaggataatttgggcactctggtcatcatcggcggcacgacgctaccagtcttcggtattgtggaagatgttgtgactaatctatcctctatatttgctgaggtcatgctgtttgagactgttgaagagttggcaatctttggctccgcggtacctaatggggccagcattctctgtctaactgatctcgatgaaccatttatgaagacattgacgccgcagaagtttaccagcttacagaaaatgttcgacgtggcgggaaccttggtgttggtttctcgtggctgcagagcagatgaaccatattccatgatgcttgtgggcatcgggcggacagtcaagaccgaaaatccgaaaatcaaccttcaactacttgacattgaagccgttgaggacacaacggccaacatgctgtctgaagctctgcttagacaccatcttctgaggcaatggcagtctaggaaagaaccccttctctggtcctcagagccggaggttgttatgcaagacagacgcgcactcattccgaggctcttgcccagcacagacaagaatcagcgttacaactcccagagacgcgctataaccaaggaggtcgaccctagacaggcaaccatacagatgatccagaatggagtcacattcgacgtcaatgatgtttcgccactgctaatttccgatgcaccatcgtcgaaatccattacagttcgcagcattctttcctcattccagtctctcaaaattggaagcgccggtttcctccgtctcatctacggtgtgacttcttcgtctgagacagttgtcgccctttcatgctccactcagtccccagcagttgtaccatccaagtggtgtgtaccaattgcaggccatgctatgggtcatagcccatcatcactccttacaactttggctgccaatatcatggcgaaggaggttctgagctctgtgccggatggtggagttcttctgatacgggaggcagatgagcctttcaagtcttatcttttgcacatggcaaaagaattgagtgtcagaacggtttttgttaccagtcagggcaacacgggtacccctgacagcttctatatccaccccagactttcgcagcataaattgaagcagctccttcctgcagatgttgccgtctacgctgatctatcccagggggctggagcagatgatttatcagaactacttgataagtgtctcccatctcaatgcgtccatatcaaacgaagctctcttctcaataatgatatcactgatcctcatccccgtttttgtgacatgatcagtcaacttcttcagcaaacaattgaaacttccacgcattctgcaagaactatcaccattccgcttagcagagtgtccgatcattctgtgtttgagccttttaccgtggttgactggtcaattcaatccgttccggtcaaagttcagccaatcgattctggcatcatcttcaggccggatcgaacatacttcttcgttggtctagctggcgagctgggtcagtccttgtgccaatggatgatttctcatggagccaagtattttgtcttgagtagtcggtctccaaaggtcagcccgaattttattgaggggatggcgcagcagggagcgacagtcagaacattgccgttgtcagtaaatttgctccaacttttacctcaccgactaacaaaacccagagatattacaagccgaaggtccctttggtcctgctaccgagagatcagccgcaccatgcccgccgttggcggcgtcatcaacggtgccatgatcctccaagacagcgttttcgaaaacatgacccatgaacaattcctcaaagtgatcagaccaaaggtccaaggcaccatactcttggacgaactattctatgactcacccctagaattcttcatcgtcacttcctccatcaccgcagccatcggtttcagcggacagggtaactactcggcggcgaacacgttcatgacctctctcatgtaccagcgcaagaagaggggggttcctggctcctctatggacatcccggctgttcacggtattggatatgccgcccaagaggataactttgactttgagtatttcactacactcggctacaacaatgtttctgagcaagacttctgcacactttttgcagaggctattctctccggtcgcgccgactcccttgatgaggctgaggttgtatcaggtgttaattatgtgtcgcccgacttggatatcccccagactcacaccagagatatcaaattctcccattacatcctgaccgcggaagaaggatccagcgtcagcggtagcaagtccgccgcgcaggtgagggtacagttgcagggagtgacaagcgaagaggcaatctatgatattgtcaaaggtaagtcactgattattgaacactaccgacagcttgactgatttcataacagattccttcctggtgaatctcaaaaaagttctccagatctcagctgatgatgatattgatctttcaacgcctcttgtggagcaggggctggactcacttgtggctgtaatggttcgctcgtggtttttgaaagagatcgaggtcgatattccggttctgaagatccttgacggcagctctatttctgatcttcttcaactggccgtttccaagatacctacatctatcacttgtgcagaggacccgaaaagctacactgacactccaagcccatcgttaccaacacctgccaaacccgtcttcaatagtaccatttctggaacacctagcgactctacacccagctactcaccactgctgacacctagtgaaagcgagacatcatccattgagctgctgactccagatgagccccttaaatccaaggaactaggggccacagataaactggcccgatcgcaacgggacttggtcattcagcattcccgcctcacgagagagcccatgtcctttgggcaagccagattctggttcctccatcatttcttgaagagcaaaacgtccttcaacttttcgacttctgcacgtctggtgggcccgctgcgagtgacggcctttgagcgagctttggacacagtgattcagcgacacgaaggtctacgtactagattcctctggttggatggggatattggcacacctatgcaggagattatctctcaccctctgcttaaattggagaccaagcgcatatactccgatgctgaggcagccgacgaactagagaggttgcaaaatcacgaatatgatctggaagactgggggtctatcagagcaatgcttcttattttttccgacaccgtccactacttcctccttggatgtcatcatattgccttggatggacaaagtatgcacattcttttctcggagctcgacggtttgtataacggtaaagctgttcctcgaatccccgatgcctcgcaataccgaaagtttgctaccagacagaaacaagattacgaatctgggctattgcaggctgacatcgatttcttccgtgacatcgtccgtgaggatccgggtgcgattgagccgttctcgttctcgcacctctcaaagcggaagattctagatacctaccggtgagttgacaatgaaatcgggttgattattttctgacattgttctaggcaccatcgcgcgtcgacccggctgggagccgggttagctcgcaaggtcaagcaaattgcccgcaagcttcagagcacgaattttcatttctacctgactattcttcaagcgctcgtattccgcctacttccctataccaaccaattctttgtcggaattgcggacgcgaaccgagtggataaagattcaatcaacacgatcggttgcctcgtgaatctactgccgctcaagttcaaccgggcggactcatccaaactcgatcatgccgtcaaactcacacggagcaaggtgtactctgctctccagcactcgcgagtgccattcgatgttcttgtcaatgagctcgagatcaaccgttccgccatgcacaccccaatcttccaaatcttcatggactaccggctaggcgaccacgagaactcgcggctagtcggttgcgatgccgagctttcgtggaataatgctgctacagggtatgatttgcacctggaggtgcttgatactgtcgatgaagagtcgctcgttgttttgaaagtgcaagagggtctctattccaaggaagcagcggacttgctgcttcgtgctttcaccaatctcctagaacaggccacacaaagtcctgccgatcgtatcgatctatcgtcgcctctgctgtggtctagaaaggatattgatgatgcgttagcgttgggaaagggtatgtcacacttcgaaatcagggagattacgactaatcctcctctataggtccggaactgaaccctgaatggccatcgacggtcgcacaccgcgttgatgagatggtggatgcacaccctgatgtcatagctatcaaggatggacatggacatgccctcacctatagtgccatggccgaccgcgttaacacgatcgctgctaccctccttgaatatgtctctggtggcgatagtgttgccgtgttccaagagccaagcgctgactggatctgttcgctactcgccatcttccgtgttggggcggcgtatgtccccttggatctgaagaatggtctgcaacggcttgcgggtgctgttgaagttgccagcccgcgggttatcctccacgataaattcacagaggctcgagtgccggatcttcgggtggcaagggcagctatcgtcaatgtctccgatattgacatgaaccccgatgccaaagtaccgaacagggccatggcagagtccactgcggctattctgttcactagcgggtcgacgggtgttcccaagggcatcgtactaccgcattcttgcttcgcgacgcatgtcgaagctgtcgaaaaagcctggggcgtgggcgcggcggtagtcctccaacaaattgccctcagttttgacttttccttgcatcagatcttcacggcccttgccaacgggggaaccctctttgtggtcccgtacgagaaacgcggagacccgtatgaaatcaccaagatcatgaagcaagaaggagtcacccacaccctggccaccccaaccgaatatggtatgtggttcgatgcaggggcggacattctctcccagtgctcttcctggaaatgggctcttgtcggtggcgaagccttgccaaagtcaattgttcgacgcttccgggatttgaactcgagtaatctcaagctcttcgatttctatggacctgtagaggccactattgcacttaccaaaggcgaggtcaatttcgggctcgctgatactgaacaaccaattccggttggaaggcttcttcccaactactctgtctacattctagacgaagcgctgcagcctctcccgatcggtgtcccgggggagattgttgttggcggacccggagtggcggcaggttaccttggccaagaagagctcacaaacgagaagtttatccccgtccctagctacttgcaggacgaacgctccaagaagcttggatggaacagattatatcggaccggtgaccgtggacgcctgaacaacgacggcactctcatatatgagggtcggatcaacggtgacgatcagatcaagcttcgtggcattcgcattgagctgggggagatcgaaaatgctattatcgaggtcgcgaacggcaaagtctctcaggcggttgttgctgtccatggcgaagaggctgacaaatttttggtggcttatgttgtcctttcatcgcatggtgaaaagtccggtgacaatcttttcacagccatcaaagcagcactcccccttcccagctatatgcgaccttcgctattcattcccattcacagtgtcccgatgaacgtgcatggaaagactgatcgcaaggctctttacaatattcctttgccggatatcgtgacttcgggtccctctgagcgaggtctgatgaatttccaagaaaagaaactctgtggattatgggaagagatcttgccagcatatggtgccgtaatcagctcagggacagacttcttccatgttggaggaaactcgctgttgcttgtcaaacttcaacgccgcctcaaggaagcctttgcgttttctccacgactcgctgatctcatgaactctagtacattgagcgatatggcccgccttctagaggacacggatgcgagtgtggtcgattgggaggctgaaacatctgtgccggcatcatgggctgatctcgcacagagtgccacgccgtctgccccaaatgacagaatgacggtccttttgacgggcgcaactggttatatcggccgtcatctcctctcctctcttcttgaaagcacccgtgtgtccagaatcatctgccttgtccgtgacaaaagcaagctagtcacagaatctgagaaagtcgtggcaatctcctgcgctttcgacaagcccaatcttgggctcacctccgatgagcttagctatctgactcacaatgccgacatcgtggtgcattgtgctgccaatcgatccttctgggatgactaccaggcactgagagccgtgaacttctattccgtccgtgacatcgcccgtctgtgtcttccgcgccgcttgccgcttcacttcttttcttccggcgctgtcgccgaccaagcggatctcgcggattcacacgatggctatttgacaagcaaatgggcagccgaaaagttccttcacaatgtatctcaggagtttggtttgccggtgcatatccacagtccaagcgcagcaactgcagacacgccgtacacagtcgactccatcgtccaacaagactttatcgaatgtgcacagcgtgtcggtgcacggcccgatctcgagggtacgtccggccatatggatctcagtcagacgaccggcttcatcgcgacagcatcggaggccattcttaacgggcgtgaagacatcgataacaatgctcccatactcaggagggtggtatataaccccacccaacggttcgatatccagcgctccacttcttctatcggtgctgatcccagatgggcgtcactgccgacgatggatatgctgcagtggatggggaaggcaaagcagaatgggttcccgtatgtgctgacggcccagcatattgtgatcggttcgaagacgggacaggtggtatctaggcgataggtcttgcagacatgacgctgaaattgtgtatacattagatgcatttattttcttcttctatgattctttttcccacacaatccagtacatacgaccatagggtgtggaaaacagggcttcccgtccgctcagccgtacttaagcnnnnnnnnnnnnnnnnnnnnnnnnnnnnnnnnnnnnnnnnnnnnnnnnnnnnnnnnnnnnnnnnnnnnnnnnnnnnnnnnnnnnnnnnnnnnnnnnnnnnnnnnnnnnnnnnnnnnnnnnnnnnnnnnnnnnnnnnnnnnnnnnnnnnnnnnnnnnnnnnnnnnnnnnnnnnnnnnnnnnnnnnnnnnnnnnnnnnnnnnnnnnnnnnnnnnnnnnnnnnnnnnnnnnnnnnnnnnnnnnnnnnnnnnnnnnnnnnnnnnnnnnnnnnnnnnnnnnnnnnnnnnnnnnnnnnnnnnnnnnnnnnnnnnnnnnnnnnnnnnnnnnnnnnnnnnnnnnnnnnnnnnncgccggtgagttagtagttgggtgggtgaccaccagcgaatcctcactgttgtatgtttttgtttttattatttgttgagtacggagtatagcaatagcatgttcatcttaggccctgtggtggacctctatgaatgactttttttggaaatgaagcttaacgagacctgagagcagaaggtaggtgggctcaagggtggaggaaaagtagaaactgacatgagagcacttgatatatctatctgacgctatgaccatcaaggggggcagaggtcacctgacccaatagtgataagccttcttaccatcccatctacggctatagtctatagttctcagttattatatattcccctccagtgctataccaaatacatacgaccatagggtgtggaaaatagggcttcccgtccgctcagccgtactcaagccacacgccggtgagttagtagttgggtgggtgaccaccagcgaatcctcactgttgtatgtttttttatttattggcaaaggttacatacatacaaatagaaaggtgcccaggtgatctgcacacaacaatcaaacaatccttttcccgtcgtctacctggaaaactcgagaactggggagaaaagacatccgaaaagacatccaaaaagacttactactagacagtaccaagatgacagacaaggccgcataagcggcctatcattcttgtttggtactgggtcaagattatattcagttcgtgaggcgtctctctatcgcttattttcttttatcctcactgccaaaaaaaacacaagaagaagccaactcaaaaccatccctgcatatggagcgtacatcttcagctattaggcgtaaaagacacagatagattgtctgtatagatggttacgtatgttaaatctgtactaatatatcccgttttcatttagtttgtgaaagtcgatttctacgtttatagtacgcaagatagctgcttaagtattagtcttgagcaggcgagggtataatcggcacctccatgagaggtcaactataatatgcggaaatcttgagattgggtgctatgtttctgttgctgatggatgtttgtctttattagagtatagagaacgcagttgcctcccgtcatagagattatcaacacaaaccatatatcaagtcatcaattatcggcagactccaaaatgctcgccgccttgtctatctcatcaatgtcattgacaaactgcagggctattgggagacctgatttttgagcaatgtccctaagacgcttcatgacccattttcgggtgcggcctcttgtgactggggattttccaaccgtgtataagcaccacattagtagatgcccacccgaagcacttccgttggcagatggatcggaagacaaatcggcagaagtaggagactccgctggggacaacacagctcccaaggactgcggaactgtggccaaaatatcgtcacccagagttttgaggattcgacatgtcttttcaagggttgtcgctatttccttttggcgggccggtgggagacccgcagtgagggctttcgacaaaaggtggaattcaatctcgcagataatgacttgaaggatacgagaattgttccaaagtcttatagcccacgcggatctgtagaggtcatatcgagaattgtaaatgaggtctgggtctccactgtgatcttcaatcgttgcatacggttcttgcgtcctaaaattaccaagaacgtcttgaaagtcacgttgaaggatagcagattcttccaggaagtatgctaaagttgcaccatctttgattttggtcaccgtaacatccgacagaagattgacagtccgcgtggccagcacgcctagtagccaaaggcaactggagttgtcggcctgcttgcttgcctcttcttgcaactcaagcatatctcgtggaaatggctcaaggcgatgaacacaggcagcgcacatatctgcacgcacttgattgaacatgggaatagaggctggacttgagaattggctcttgccacgtgaaaccaccagcgccacggtcccttttatatattggaaccatgtttcaaaattgctcacatgctcgaacaagccaagagagatgactgacattaacgtactatccttgatagattcgacaggagaactgagcgctgcgttcactttgtctatcgcttcccagtattttgtgcgggcccgctgggacaattcaggctgttgagtggagtttgccagggctgcaagacccacagctgccatgctggcaatcaaggtcggattctcaccatcagcgctaaacactgccggcacatagtccagataccctcgagagggagaaagaccaccaacgacgaaatgaaatagaaaatagttgacgcccacctcgtccgagctgagactcagagtgcgggatgggggcgatcttttcaatgtttccaagccatctgcctttgcccgagcgtctttggagcgcttaattgtgtgggtggtttgatcgcggaagaccagctcccattcatctctatacccttgacattcctcgtgcgcacgaatgcactgtccacaatggggaaacttctggtcgcactttacaaaaatactcagtactcagcattgagcgagtcctatccgacagtagattgatcccaggcacttacccttcgcttgatagatcggcagttgccgcaatttttggaacgtcgtccactcgctggcataattatgattcagaagagaagggagtacgcataagatgaaaaatgagcacttggcaagttctcttggcggttggaaagaagaaacaagctatgacattgttgactctttttaaggtacaaactacgcggctaccccgctgggctgagagctgaaggctcagactcagccgtgcgctaccccttttgcgccaagatctgcaaatcatacagctaagctaacacatgagaagtgtccaattcccccccctatttctccgaggtcgagaatttgtcgtttattcatgcggaaagagatgatgaatgtagcatttaataaccagcgaaactgcgtggtgttcaactcttgaaaacaagagaatagaagagatggagagtccaaatacacggtcagatacagtactaaaccgtttgatacagggtaatttaccccgaatctgatcagcggggaaatatcggggaatggaccgcagaattacttctcttagccactttatgtgaactatgttaccgaaatattagtgatacttcgacgattgacttagtttcgcttcttacaacacaatggccttttcagtcttaacaaattcagtatcattatggaagcgaacttcctcctatacacaacgtgacggctttctttttctcttcgttcttcaatttcatcctcaaagccactcttcacgcccaaaagacccatccttcaaacagaaaaacgaaactcacacgcccattggtttcggctcgatatcttgctgggggactggagtaagcttcacgaagtcgctttccagaatggctgatattcccaaggccatggtcattcccatggcaatgatttcctccaatacatccatgcacagatagaccgtggtatttccatccagtgcaaaggcactaagcgttgtgtaatcgctgagcgccgagtagacgaggcgaaccgccaacaagggagtagaaagagcaatggccaggaacaacttcttttggaatctccgcatagagaagctcagctcatagaaaagccaaagactgaggagaacaaagatgacgaatacagccaggaaaattcccatggctacttttgcgagcttgccagggtggtaagttccgtcgttgccgttggaggagctgactccagcgataccgagaatgagagcgatgatggtgaccagagtcagcaatgccatgggcctcggaggcattcttctatccacatcactataaagacacacgttagtctctgatcggcgcgatgaatactttcgcagtgaaaaactcacatttgtctcagcagtccgataaaagtaagtaagagaggtgcaataccaatcatttggcacactgccaccgcgactttgatgttgtaggaatcattgctgattgccagcagcgaggatatacttccagcgatccggatgagagaaagggtgacggcgtaccgccaaatcttgctcccttgcctccaacctgtcctcttccagatgaagatggcagcaacgagaatgatgggaaacacgatcagctggaggatagcgatgccgtttcgatagctaacagcagccatgttgctttaaattaatggtaggacaaagaaaaggacgtcgtcgaggtaatttgaagtgtggtcaggaatgcaaacccgtttcttgagtggtttttgtaacacagatatctggtatcctttatacttcgaattgtccttcaatttgatgttgattcagcccggcgatcttactgccagcgtcaccgatcgtgattaaacgttccttattgactggtctaacatctatattacccgaataggaagattcttgctgatctcagcgtgtcagtggcttgggtcctaagcctcgccaagattggggccgaaatgatctgattatatcttagctatatctcctccagggccgatccctctcgagccaaagcgtaatatactacagtagcggtgattttttttacactgccccgcagcatcgaagatgcccaattcgggggagcgcccgaaagcttgttctgcttgtgcgcccggtatatcttataacacagtcaatcatattgcgggccgctgtgacaataagagaaagggccatttttgttgtcgattgacaatgtattgattatcaatatttcatccagcagtgacgtgtaaggcgctattgatgcagcctttgactgcagcatggaagaagcgggctgaatgaaatgcaaacgaaatttgcaaagatacagcagcctccatcggaaatgccgtgagaggctgagagaaaattatttgttattgctccgtgcggggtaccgatgaattgatcaccatgatctacacgtttacttgtccgagtatcgtgaggttgaacaaagaacttgggattcccgatccatagcgctagtccactttggggaatcgagatgcagcaccaatcacagcgctctcgaccccgttcgtgttgcaaagccaattgaccaaagaaagagtactagtctaatcaggcctacaacgggtgatagataggaatgaatggaacgttaattttctaaccgagtaacagtctaaagtgaatatacggtcagatacaatcctaaaccatcggatacaggtcgtccgcggttggttttgctctcacgggccctataccctagtagcaactctagggcacctacactatagttggcgcactatggtttctcggtccctgattggtttgactcgagatattgacagatatcaagctcgtggtggctctgcgccccaaggggccacacgtggtagatccatcgatcagatcagccaagtcacaccgtgatgtaagagcattggcccggatccatcgaattctctttctacttcttcatcaccaccacagcccatcggtgcagttgtcgagatggaccttttcatctaaaaccttgggctagtctacgacttgatttcgacacaaggtagaacatttctatgcagagcattttaaagcgtgtcctggtcaccttgacatttcatccttctacgcctaagtcctttagcccaactccaataaaggatctcagttaagtcctctttcctcttgcacagctttatcttgtctcaatcatcgtatatattattcttctcatatgaagctccactaccagaatcccctgaataagttactaattctacacgagctcggattttctccactgtccctgcgggaagccaatagaccctctacgggctctcaagaagcttcagcttactgcggctaaaactggatgagagactggtaatcaaaacaagctcaatatattaaccgtgagatgccagatctgagctactcgtagcagtagtaggcactacgcacgtttcaatgtcagccttcgattcgccgataaaatgcaaaaagaaacttactccgagggacccttccagccaacacatttccagcagtcaaagaagtgggtaggatcgtacttcttctttatccgaagcaactcgggataattcgatccgaaaaaggtctcttgccatttcggctccaagtaatggccttcattcaaataacaccctccaccaggcgtcaaacgtttcagtggctcgacagtatccaaccatgcctcgagcagatttgtctcgttttggacaccaagttcactcgtccatccacctgtcatgagagtatgccagagagctgggcgccaggcaggattggcacttgtcgtgttgccattttggtgatttacaggcgtggtcatgatgatttgggtgagggaatcacctgcggggagcagcttattgctgagccgaactccttgaaggacggcatcgactaggtctgcgactttgcgtttgctctcaaataatgagcgcgggatcagtcgacctgcaacagcttcaaagattccgcccggtgtgtattcggcagcgatcccatcggtaatctgtaagaattcggtatatttgggatatgtcgtgtaattgctcttggtgacctggatatttgtttgattcgccaaaaaggaggaaaatcccctggtcagagttttcaaagccgtttcgttgttcgaaggcaggacaagataaatttcagctttggttggccagtagtaagcatgtcctgagatgttgttatgagaccaggtaggttggtaggttgcgtgttgcgtgagaacctgtttcaatgcagcgtaattggcagtttcattcccgtgtgtcgtgaagctgccctcgaattgatacacgttgattttgaccgctggatggagttgaaagcgatagcttgtcaaaatgccgaaggagcctccgcctccgcctcgcatggcccagaagagctcgggatcattgcatttattgattactcgcaatttgccgtctgcagttacgacctcgaattcaaccgcattatccaccatcagaccatacttgggaccaaagacgccgtggccacctccttgaccaaagccgccagccaggccaaccgacccttcattgccaccggtaacatccatgttgaactttgtgaaataggtgtagacgtccgtcgcctgagcaccggatcctatctctgcgatatgttgaccgttcgaggcaggacaattggatgcagtaaagtttttgtgatacttcatattgttcatattgtgagtccagattgcaagagtgtcaggactagtagagcgtccaaagtagtcatgtcctgtgttcttgatcgtgatccgaagatgatgttttcgggcgaatttcacagcggtaacaacatggcttggtttcctagcatcgacatacaatgatgatagtcggccaaggtagcaattgtcggaaatgacctcagccggattcaaagcattcagggcacatgtttgggaccggcatccttcccagttgagtcctgttgctgcgccgtatacgtcggttcgtgcttggtttgttgaatagttcgatttgacgatatcacaggctgaagggtcatagtattgagaactataatagcagcttgcggcaaaggggaccgtgcggtgcaggtttccggacagactgctgttgaaactctcccattctttgttcgatggccaacaaggctgtccggccttacaattgtaccctggggacgttgctgatgtggtggagataaggccaaagaccgccaatacagatgcggcgttcaccaaaggggcaaacaataattgtaccatgattgaaaaccggtcgtaggaaaggaaggaattgggaaggaatagttgtgatttcatgagatgctagcacaggtgtcgcattcaagtattatttatagttaccggatagcccatgagatcgtcacagcccccaatgttgatattttcccggccagcacacgagtaagctagtgatacttaatttaccaaaattgtttagatccctcaattctagtcgtatccactatgtagcagcacattgtccagtggggtccacgcgtttgtttctagagtaggtctgaatgagagcgtcggattggttgacaagagacccatagagctaaacttattttagaaagcgaaatgcagaaccaatcaacacctgaaaagataaatggtgatcatccaaacttttgttgacggcgtccagcggtctgtgttcttagagagttcaaatttagtaataattacgtagcattactagtctagctgtgtagataatccaataggaatatttttgggatttccccccaagtaggggtaagctgaacggttatgcccgaaaggatgcatttgctctggctgctgcaacgtcgctgccgtcatcgtttttgttagaacgtatagcagtgcatcctatataccctgataggagtagcttgaaagctagagtacgttaagggggctatatcatgatctcccgaaaagaagcaatatagtctcggacaatatgcgcagcatgggctggagcgttctcttgttagaaaattgatggatcgtcgagtaatgttggtggaaagacggccgtttctggcgccaaaagttgtcattttcggcgtcattttcacaggttctcatattctaggtgtacagtggttttgtcgggcttggtctatcactcgatatatattccacttcttttatttaattctccaaaaacgctctactgcatttcgctattgattttatggctgcacaacagtccatacctgtggaattcagccatccacttttccagtggcgcagagctctacctaaaatgttatattgctgttttagattctaacgtttgacaccaagcatgtgtgcctactagtcatattcattatctcagcagatctgaaggtggagaataatctggtttggattgaggatccttcggtcctgcaagattttgcgcgtgcatctctcggaaacccactgcgcgacgatattgaagggcatcatcccctagaaataatagaatactatatgagcgaagcaaatgtaaagtaatctcaaataacgactcacatggtccgcggtcaaaatcaatcgataccattccatgatcagcttgatctcgacctgtcgatggcccaatggcaaaatgaggctgtttggcatgagtgctatcgctctgtatttattggacatggtggtcacctgaccatcagcccggcaggcaccaacccccataactagatagtcgggcattctgcccttcaggaattgacaactctctccctctttcatcgcatcactacactgcagtcacatcagtattaaaacacattctttttgatggtcggtgtcacatgagtaggaaaggctcccgtatttggtggaggaagtagataaccaagatgtttggtatcctgcgattgctttcacaatttcaaatctatcttcgatgcccatcttgtcccaggcatgacctagctggatacgcccaaccttttccatgatgatgtattcggcaccaacagcgttctcgcctgctttcgaactccaggctagaacacatggagcaggagtacccaaaatattgcgaaccttacgaagattagtgatcatcaaagagcaggtagccacacagtcaaggacgccttacaaattccattgtggcgacctcacttgctgtcgtaaaatgaggctgtccagcattggggtttggcacctttccgaccacttcagcgccatttgccatggtgaataggagtgttttgttaaacatgccatcggggaatttttcgatatgagcatattcccttgagccaacagaatcagcggcaagcctcgcaagctcattcatatcaaacttcacccgacgtattgacagttcatgatcttcatttgacacatttagtccccttgtgtattcgaagaaatcgttaaccgagttccaattcttggaaagacatgacctcttcaaggacctggctgattgtgtaaagagcctgtgcataacggtgaaaacgaatggctatgctgcggttgcgaagatagtacaatacatggaaggtttaagcaagttcacgcgctaggtgtggcctacgccttaaacccgttcaaaacataatgtcgaattttgtacagcgtaatttaccactaggccataacaaaaaaattaaggttcctgtttagggcctagaggggccatatcccattcttgacacataagcaacgcgcgtccagcctcttcgcgtggcaataccttatcaatccattccaaccttgcaaggttcgattgagctgcttactaatgatagaggtgagcgccgggtgagaacgagggtcgctcagacgccttggagagaggggtacgatactcctagtggccttgtctttgccatgttagtttgggtactttatattaccagaggttgaaagtacatacatcaagcggttccatagctcagttggttagagcgctgtgctaataacgcagatgtcgagggttcgaccccctctgggaccattcttttttgttttttgtttttcgataaatcttatcagaatgtgatagttatggctcatttaagccttaaacaggaacattggtttttgttatagtctagtggaaaatatgctgcacgattttccgtcaaatcctcttctatcagtatccatcattgctttttgcttttacaaagctgtaataggctttaaggtagcagtattaggactacgtagccggactgaaatctacccagtgggcctgactctgagcgccctcataaaagcggcagcatctcacccgacagaggaaatatgtacgtacaacatggagtcacctaggtggtttataaagtcttcttatcgggcttagtctgtcactcaatgccttcaccatattgtgtcagtgcgagggcacgccatgttccacctaattttatcttattttctgactctgtgtatgttgtagttagaagaaagctgattatatatagtaatagtccgtggtagagaaataccctccgtgtcaatagactatctgacacatttctaatattgcgacatgatggcgtgttatcagtaacgtgctactagatagatatcactaagccacctatttccccgcagctataatatctaacagtaatccccattttcccgctcatcctcagcaacaaaatgggtagcataacagcaactacgttccaagatccttttcaaaaagtcccaacgggccgaactggtaaataatacgattgacacatccatcatcatccatgaacccgaattaagaacgcacatctagatggcctcgcagctctcgttgggaagttccgagaggataccgatcccaacagaactgatctccttgtgggagtgtataaaacggaggagggaaagccgtacgtgttgccgagtgtgaaagaggtatatataacgtctgaaagttcacctttccaccctcagcagatcactaaatttttgatattcgttacaggcaaagaacagaatcttcaatgatcctgattggcatcatgagtatcgcctttccgctctaggttcccagctttatagggacttgagcgccaatttgctttttgggcctgaccatcgtcttttgcgggagaaaaggtaaacggagaccgatatgctttctcaaaaacgatcgagggctgactttcccgctcaggatagtttcaacccagactctcggcgcaagtggcggatgccatgtcggcgcagtgctgttgaaaaatcattatggaccgtggaaggagaatggaaaccccgagattttccttccgagcgactcctggtgtaagttgtcgctagtgacattatacgaaggcaattctgaccgggtcatagtgaatcatcctttcgtattcacgtctgcgggaattaaggctagtcttctgccttattttagcagcaagacaaacaatttcgattttgagaggttttcagaggccatcagatcgttgccagctcaatccgtcgtgcttctccagtccggtgcccagaatccaactggatgtgatccatcaccggatcagtggcgagagttggcctcgatcttctcccagcgcggtcatttggcattcttcgatgctgcatatcccggatttgcctcgggagacattgatacggatcttgccggtgttcgtttgtttgccgagcaagaaatcccgcttgttttcgtctcaacatacggcaaatccttcgggctttacagcgagcgcgttggaattctctcgattcttgttccaagcgaagaagtggggaagaacatagaaacgcaattgagactactcgcacgagcggagtccggcgcaccgcccgatttcgggtccaagattgttgaaacaattctctcggatgagactttggagcgccaatggcggcaggaagtgcgcgatatggcgaacgaactcaagcgccgtcgagttgcgctaagggaaggattggagaaattggaaacaccaggtagctggcggcatctcactgatcagaacggaatgttttcgtaggtgttaccaatatcggacctagggagactcaagatactgaccttctttagatatgttggactgtccgtggaacaagtcactattctccgagagaagcaccatgtttatcttcaggactctgggagaatatctatcgcgtatgtttgatcggcatattttgtgaataggcggtgagctgacatttctttttcttagtgggctcaacgacttcaatatcgattacactgctcgcagcatcagtgctgtcgtcaaagctacgacttaaattaacttgaaacgggttgtctcatcgattgcacaattcagacagggaggattcgactcgagggcatgatattcgcgtctgagttacatatgaattaggacaaacatgaagtaagagaaaggaggaatcaacaaccatatctatccataaaagctctgaacgaggggacctgcagaagttgtattgccgtcagaagtttctctgggcagtaaataaatactttggacatgatcgcattcacatgttgtcgctcaattgagtcaatatctggacgaaagcgtgtaatgattgaatcgagggcatactcttgattaggcattggatcttgatcataccaggaatcacgacctgggcactataccaaagtcaccgagaaagaattcctcagtccgtaggctttcgggggccttcacagctcaaacaagccccccccccctgcttccaaagctcgataaatggtatgatttgctttagtggccataatttagcgtgtcatatatgaatataaggttctgctttcttgttttgacgttaattctaaagtggccataagaatcaacccaagatggtcgtcccatggtactcgaggttatcgtcaatatagaagtggatatacgaacctagtgtggtcaagaccgactgtaggtggtgcagtcatatcaatttgacatataatgtaagagacttcaaactatgagggagggtatcgtcacaaatatttaatatcgctacattttctatgaaaacaccaatttcgagcttttccaatctgtttatctaccaagtccagcattgtgcactctaaggcaggctgtattgcaatgcggatccagttgctgtgatatgaatattcggtcttgatttgcaacagaggagtgccaattctatgcagtgatgattcaatagagcttatgtacgttagacgccgaggaatagtgcggtaggagtagatatttccatgtcttcagcttcaatgacaagagagtcactacatatgcactttgatactctctgttttgtagtaatattatgttatctgacaagtgatgagggtctaatagctccttctgtatcatgacctttgtttgcccgaattttgttgcagctgtcacaaacagcccagaacttccaccagtcctaatttcgcccccaggcaattttatcaatcaaacttcccttcttgttttatcaatactgtgttttcacccattcactcccaaccctccttttgtcaacatcatcacaaagatggcttccgttagctttgccgagccgtcttttgtcgaacttgttccagcacttgttggagagtctaatttctctacgtggactacttcactcaagtggaccctcgactcgcgcgacactcgttattacgcgcttctcaccggcgcgtggagtgaacccagcgcagttgaccccacacagcctaccccggctgaagtcgaggatcgtacccagtgggatacagccagtcgttacctccttccgctactgaatgccactgtccaccacacggccaagttctatattctcgatgccaataacgcgcgtaccgcatatgccaacctccaccgcgcgttcgcagcccggtcttacgaagctggtttcgccaatttcctcaagtttatcaacaccacatacacttcaaacagacctcaagctttcgtcaatgagtggcgtctcgccctcggcgagctccaagagtgcaattcgacaaagctcacgcctctcctcatcttttaccatttcttgaacgctgtgagcaccaacccagctgcgcatgagtggctcgacggcttcctcagttcgaaagtctccaccgatacaaccatcgagtcaaccttcacagactttgtcgtttttgaggaacgtcgcctccacgctctcaatcaagctcattcatttagcttgaacaaagggaatcacctgccatacttttgccagtttcatcaacgtcaagccggtcattccagtgcgaactgcttccgcaacccggcttacttagctctggacaaatcagctccagctcccactcccgctcccgctcccgctccccgtgcagtcactgaagacccacctgtggagtagagcagcatctcaccaactaggggctgtgtttgtgggtggtttgccacaattgttcatggggaggtgttcggattggatggttccgtgaaatttgagtcttagcaacaatcaactcttcgcatgttaccatgcacattgatatcgtccttcctgtaggcgtctctcgacatgcaaataagaaatagtttagtatgacaaggctttggccaatgtcggagcaaaataaaaagactaaataaaaataaaaatatctggactcgcggggaatcgaaccccggaccactcccatgctaagggagtattataccactaaaccacaagcccagttgattggtggattgaatccaatagtgaaatgagagctttaacctttaagcacacattacacagcacctcacatatcgttcagttttcacctggttccattgaagtgcagccaccatcctatttgttattcacctacccatccatcaacatggagaatactttggatggaaatagaaagagatgtgacattgatggctttgttcaagtgcctcaatctgttttgttccaaccacacccttgtatacagactttaactgcagtgtatctgttggactgaaagatttctagtagctgattttccaggacatcaacacccatctcatcgtttgcccagtggaatgccatgaccatacctctggtagatggtctgtgcctgatggcgtcattgatagatctattcaggctcgcagcgagctcgaggctgatggccggcgggatttctcatagatggaacattgtggattccttgccattatcattttgtatgactgactgtaaagaaatacgtgtaatctatgtctgtcccgatttactgatctttgtcatgttggtccttgcgcaggtgctttgaagtttagtgaattcgtcaaatctgataccatattatattatttacactcaatttgcaactatcctctaattggatgcggcgagcgcctgcctattcgcgagacttcctgatgccctaaacaaagccggattcctgaggaagttctcgtgcgctctgaactcccccttcggtttcttcggttccctcatcatggggtctctgccataaccaccaccaccaggggtgttgacaatgatgcgatctcccgcacgcatatcagccgatgatttgccgctcatgccaacatggcgcacctccccagtgataggatcatgtctgacccatatattaacaccgcgcatgccttcacacccaccagcaaggccatatggtgcattgacacgtctttctgagagaatcgagacctggacggggatgcggaactcaatgtcgcgaacgcagccatcacctccacgatgcaacccggctccaccactgcccttccgaatggagaattctcgaaggatcactggatactgtctctcgaaaatctcggggtcaccaatgcgggtatttgtcacacctgtgtgcacaccactctcgccttcccagtcggcgccggctcccgctcctccggcaatcgtctcatagtatccgaatcccttgagaatctcgccggtcacggcatctttgcctccgtacccgaaggtcaggttgttacatgttccctgcgatgcagcggctgtgtggaacgccttgaagatgaggtcgatgacgcggtttgtcgtctcgcctgtcgacccgactgttgctgctgtgaaggatggtgtcaggagtgtgcccttcgggcagacaatattgatgggttgcagacagccctggttgagtggtatgtcggaggagatcatgcaacggaggcagtactgggtcagtgttagtagtgtccgcaagctgtcatgaaaatttgacacgggggaggaagaaagaaagagggagaaggtgtgtgaagacttacaagaatggcagagtacatgcaggctggcgggcagttgagattaccgtggtgctcaggtccggtgcctgtaaaatcgaaaatggcctctccggtctccgaattgatggaaatacgcagtaccaatggcgtaccgtcgtcggtgtagtcgatggcctcaaggtcggcaccctcaaaccgttccgagaagaccttgagcagctcccgcaccgactgagaagcgttttcttgaatcgcattcatataaaactcgacgacaggccaagtatactcattaacaagtgagcgaatgagttgaatgcccctctgattggacgccacagcggccttcaggtcggcgatattgtctttgagggtacgtgtgccgctgcagccgggatacttagcgggctcgttgtacaatatgtcgatcagcccttcctcatcaaaaacaccctctttgatcatcttgaacgactcgaacgacgctccctcctgccataactccgtcgagttgggcggcattgacccggggatgataccgccgatgtcagcatgatggccacgattgcccacatagaagagaatctttgtcgggttttcgtcgttgtcaaacacgggcgtgatgcaagtgatatccggcagatgagttccacccgctatcggatggttactcaggatcacatcaccaggcttgagctcgcctggcttgtaccgcttggcttggtatgcgattgccgaggccatggatccgagatgacccgggatatgaggtgcgttggcgacaagacctccactggcactgaagacggcacaagagtagtcaagtcgctccttgatatttaccgagatggatgtcttttgcattgcgttgcccatttgctcggccacactcatcagccgatggctaaagacgctgagaagaattggatcgatggcctccgtactagcaggcttacgctcgctatcagtgatctcgagaatgatgtgctcggggagcttgatagccttgctgttgctgtcgaccacaattgtctgagtcttgtcgatgatcatggctgggccatggacccgagcaccggtcggcagctgggtaaggtcatacatgggagtatcgacccacccctcgttctcgaaatagacctttgaaatggactgctcgctaaactcaggggaagacaacgactcgagcttcaggagctcagcgaaagggtttgaggtgtggacgtctttagccttgccaacactgcgaacacggacgtcatcgaccaggatatcgcgctgctgggagaagccaaattcctgctcgtgtcgacgggtaaatgctgctccaaattctgcaagatcatctggttgtcggatcatcaacatcgtgtcacttccccggtaccgcatgtttagatacatctcatgctcaatggactccaggccgaaaccttgggcagctaggccttgctcgccttgtgaccgaagcttcttgaagcgagactctacccttggcataatatcagggtggtaaatcagggactcgggctcttggttttcgacagtcacgtcggcaagagccataccgtatgcagagaggatgctggagtaccgcggaatgatggcgcgacgaataccgagatctcgggccacgaagactgcgtgttggccaccagcaccaccgaagcaagccaggttgtggttggcagtctcatagccacgtccttcacttagagtccggattggtcgtgtcatagttgcattcgcgatggacaaaaagccacaagccacctcctccggtgttaggagagagtcgccatctttttcctcgttgatggtggccgttacatccaggaacatagtagtgactatgtccgtgttgagaggcttggggaatgattccttgataatccgaccgaggaagaggttggcatctgtcacagtcaaaggtcctccctttccatagcaggctggcccagggttggcaccagcgctctccgggccgaccttgaagagaccattctcccaggacaaaatggaaccaccacctgcagcgacagtattgatatcgagctggggtgtctggatagaaatctccgcgagtgtgctctcgaacacatgttcaagctcgcctgagtatcgggccacgtccgtactagtgccacccactaatttatattgttagttccataaatcatcctcatgatatgacagagaagagagcttactgtcaaatccgagcaatggtgttgcgtcactggggtcatagcaagtccttgagacgccgacgacaccgccagcgggtccactgaggacaccgcgcaggccagcaaaatttttgaagttagtcagaccgccgtctgactgattgaggaatagtttgtttccgtttttgtcttcgagcaggcccttgaagccttttcggaaactctcgagataacgtgtcgtgacaggcgtaaggtaagcatcagcgacagccgactgactccgcgggatcagctttgccatggatgaaagtttggaggacacagcaacgttgaagcccattcctttggcgagatctgcgacggcaagttcgtgatcggggaacatgtatgaatgcatgagggcaaccgcaacatcacggaatccctggtcccagagacgcttcagatcgagacggactgcatcgaggtttgggcctttgagaatcctcacggcctcccctgtgataccttcccgcaggtcaacatcggcactaatgtcgatgatagttggttctggattttcgccccatccttcgatggtcacacgctcatctacctcgataacggtttcgtataacttgtccaaacgtttcacggtgagatcgaataggtctgggcgggcctgatttccaattttgagagcttcccggaagcccttggtggtgatgaaggcgactctctcgcccttcctctccagaagtgcatttgtggcaactgtggtgcccatgcgaattgattcgacgcattccaggtctagcagagtcccgcgggggatgctggctcctgttgcgatttccagaacctgtcgtatacattccgttggtgcgtcgctgtactcgtcgggagactcagatagtactttgagaatgacattttcctcgcggccaggtatttgagcccaggcgtctgtgaaagtgccccctctgtcaatggcgatcagaattcccttggatgccattttgttgctgctcttgttctccttcttttctgattcaaataactagatccgtgatgatttacagacttgcatggaaatattcgccgtttaatagtcacggcatgcagatgtccaggccgatatagaccggcttagggttagatttgccgaatgtcgggaagtgcagctagcggccgcgggacttgggagataagcgtatgggcgggggactcagccgggggactcaatcagctattttagtcggctgaggagcagccaaaccttgttaaatcggtaatacgctgcaatgccgatccgctttcccccatgataggtactggtggcgtccactaaccccaggatgcagataagccatacccacaaattgtatgacacttaggtaaatataggataaatggactgaggtagccaggcattccccatctcactgggaagtgtgttgaactttcacttccgaattctatattcacttaagacctagctcacttcaaagtcgagcaatatcatgacggagcccgagacagagttggacatgctcaagtctgccaagatgaccaaggaggcctcgaattgcgatgaccatgagcttggtatcacaattgagacctatgatcgcaaggccgaaagcaaaatgttgcgcaagtttgacgtgagtttggctgagtaccttgttcaagacgccatgagtagaatggagagagggcatgatactgataatcttccattcagttctttgccgtcatcccactcggctttttctacatgatggctatactggatcggagcaatctaggcaatgcacaaatcgctggcatgcccgaggctatcggcctcgttgggaaccaatttggcaccgctaccacactactgtactaccccatattgctagcatcctactgcgacgtctctaacggagacgtagatatgctacttatgttcccttcgaagccccgatttcggtgttagtcaagagtgttggcccgaaagtccttatttcggcctccgccttttgttggggttcttccacactgggaatgggtatgaatgaaacacatccccgaagccagcaaaatcctttctgacacacggaacagcatttattacaaactacaaagggctctacgtctgccgtttactgatggggctgtttgaagcaggtctcatccccgcaagtgaggtttacatggccctggtttacaatcggaccgaaagagggcgacgcatgtccttattctacaccttcagctgccttgccagcgcttttggtggtctgctagcatatggactgacacagattgatggacccaacggcttcgaaggttggaggtggctgttctcagtggaagcagccatcaccatcattctagttcccatcttctacttcgtgttcccgaaaacccctgttgacgcctggttcctgaccgatgaggaaaaacgcatcgtccgggcacgctacgacaatgacccccattgggccttcgatgagaagttctcgtgggttgagcttggtaaagttttcgccgatgtgaagttttatgccttctttgtctaccagttctccatcaacctcacacagtttggcttcactacctttctccctactattatttctggcctcggttacacctctattcatgccaatctgatgaccgttcccatctatatatcggctcttgcgttcttccttgtcatcgccttcgcttcagaccgttacggtatgcggggaccgttcatggctggccctgcgggtttaattcttatcgggctcaccttgctggtttcagttgagaatctgaatgtgcgcttcttcgcttgtttctgtgagccatatcgatcttaattgtcccttgcgattaaggaaaagactaacactcgaacagtgaccgcattcggcctatatccagccgcagcgctgtcgatgatgtggctacaagacaacgtcgcaggcttttataagcggtccagcatggtcggcttcacgctgactctggccaatacggccggcgtggtagttgggcaaatttttacctccgataccaagccctactataagaaaggcctttcaatttgtctcgggttcagtgtcctggccattgtaattgccatagctctgatggtgggcatgaagatcgtgaacagaaggagagaggcagcaattcgtgcggcagaggcggccggttctccactcccccgtcaacccgagatgggagactgggacgtgtatttcaggtataatatctagagtatgtgtcgaaccacagagattcggaataagctggtatgccagggagctggactggatgggttgaaaagcgctgtctagcagcttttgataagtgtctcatattccatgtgctattgccatgtcaggcaacaggtgtcctttacaattgatgtcctgtctataataaatgatacgtaatatcatattgcactatggaggttagaatagtattggaagtcatactattgaccaagtcagcagtagaatatgtagaatacaacacacatagtattttggccctcaatacatacaccccttcaaaactcagattgatactgttattttacatattgtttacacattgtttacagaccgctcaggtgactgttcatgtgactctgggatttttctgccgattttcctatttttcggaggagctcccgataaccttcaatccgatgcgcaaatgagaatcctcaaattttgtggggaaaatagtagcgtcgccagatatctccaatcatgaagtgtctagctatatatggacggagacagaaacaatccccacagataagacccggcttgtgctagaacatcccgaggctttgagccttgctgccgatatccaccctctggatcctggatactcagataatttcggctcagcgtgctctaacaagtacttccgctttagcttgacctagccttctatggatcgtgcggagtcgtctggcgagtcgcaaagacgcgcgaaacggacaaagaggagctcggttgcgtgagcaaacacccatgacccactcttgtcatttgagatgttcaagctgaatcaattgccctcagatgccggagatgtcatgcccagaaggtcaagtgctctggaggtaccccatgcagtgcctgcttgaccgctggccaggcgagtgcttgtaactatccttttcgagagcgaaaagtcacaatatctgagaggtaggtaatttcctcccagcagctggtctgtacgcgattatatcttatctaagagtgccataaagctacctgaaacaattggaggccgcctcgaatgttctcagacatcaaaatgaatctgcccgcagccagccgaggagtcccattgacgtcgaccagctacttgactcgacgataacatcagcagtatcagacctcggtgtcgtaaacccgttgttcgatgcacgccgggagaagccacccactcagatcgtaacggaaccgtccttcgttggtgaagcggcatgcgatgcctttatcgagaggcttctgcagtcgctcagccagagagaagccaactcactcccgccaccgcacaagtacatgatagaccttcctggagcacgtatgcccgccattaactataccctacccgaccgagtccacgccaagctcctgatccaggtggccgcgaggttcatcggaaatggccagcatctctatttaaattcgtatatggaggaggtcgacagtgtctacaaaaaagatgccgaacctagctctatatggttgtgtaagttgttagcattggtcgctcttggtgagttgtactcgaataggcggcgcagtaacggtgacaatagggcgccaggggaggaatattttgtatctgctttgagtatgttacatgatcaatatgaagataccacaactctacatgtcgaggtttatcttttactggttagtcactggatattgtcgcgtctctatgaaatatacctaatttcggcaggcctgttactcgaatgcactcggtcgcgttagatctgcctacacatattcaggtattgggatgagaatcgcgctaagccttggcatgcatcgatcatcatcgtctctacataccagtgctgtcgagcgggagtcccggcgccgcatatggtggtctctttacctttttgatcggcttacttgctcgaagctcggccaaccaacggctgtgaatgacgatgacatcgacgtggagctcccgacgatggatgggttaacacctgaagagaaggaagaatttccagatccacgccacttattcgcgagcgttggccttgcgaagatagcaggagacatatgtaagcagttctcctctaactagccattcttcctattcacagggacataccaggctaacactcgaatacaaataagtgagcgatatatactgtatgccaggacgaaagaagatccacttcgtgaagagggtccacggtattctaagcaacctccgagactgggatgacacgctacctcaacacctcgctttccgctgggacgattcaaaccgccatgtcgccagtctccacctctgttacaaccagtgcataatccacacaacacgaccaattttactacacttattccgcgtgcagttctgtctggatgggtcccgcaccgcagaccagccatcgcagagcttctcgccgacgacgacggcgctggctgatagctgcgtaaatgcggcgcgtacgtccaaccgcattctttccaagctatttgttgacggcacattggctactctgggctactgggacgcgcactaccttttctcttctactctgattcttctcatgtccgccgtcatgagccccagtcaggctgtctctgacgctgttgacactgctctcagtgtgctatgctccatgcgtgatgatggtaacgttcccgccaatgactactatgaacgccttcttcttgtgcagaaaagcattgccgagctgagggatggagtcaggaaagggagagatggtggacccccaaccgccgcgcagagtcctcaaatcgcaggcacaggccatgaaagggcacagttagacgaggttggctgggctgcacagaataatgacgttggaggtgttgggatcgaaaatttcaggctcgaggacaatcttgacgcgctggccaatccttatattgacggcttcttggccgagaagtctttcacctggccgtcgaatgcatttcctgatggaactaccttgcagcagtttgcgaacgagctcggcgttagctttggcctactcgaccctcattgtggctagagggataccggacatactaaactcttcttatttgattctactgtgtatgcttagcgcattttggaagacttctctggcttaagcaagggtataagctgcattgaattcattttcaaccctggtagtagatatcaccatgtgtagatgagacagaatggtatgaaatgactacacaatggctgctaccaggcaaggaagaccactagcagaaaatacagatacagctcagaatactaacgaccagtgagcaatgtaatagcgtttgcacaatccttcccagctcgggccaagatgccagagtcttgctgtaccagaatgaaaccggctccgagcttattcaaagcccagtcatgcagctcttcattctcgtagataccagcaagaccgaatgtcttgccatgtttcttgcaggcccgactcacggcctccacagccgactgaaatccatcgctcttgaactgtgcagggaccccaagttccgtagataaatcgttcgagccgatcagcagcacatctatcccatccacggaagcaatctcgtccacattatcgatgctctcccgggtctcaatcatcacaaaaacagacgatgcattggagttattctcctgggtgaaaacaccgaccggcgtcgactgaagccggaaatatggcagctggcctgtcatagacctcttccccgtaggtggatatttgcaaatggacactgcgcttagggcatcatctgtggaagcgaaaattagtaaaagaaagaaaatcagggtatgtttcttacctttgttatgaatatggggaaagatgactcccatggcaccgccatccaagacgcgctgcacgaagccgtcgccacactggtaggggacgcggacaaagggtgtgatacctgaacccaggcccgccatacacagcagacttgcatcattgagagatagcgtcgagtgttctaggtcgataaagagcgcatcgtatccactgttcgccgccaactggaccacttgggggttggtgactagccggataccgaatgcctattatcaccagttagcagacagataattatcacacagcggtcactggaaattagacttgccttgcagatttggcccttcgccgttttctgcagcaggttattggtgtagctggaacccataatgaacaaaataaaagtcgaagtagaagtaattcgatttgacaacttgtaaatgctttgagaggagtcgagatatcttgacacaggcaaatccaatccgctgactccttttgtactgaccaggatctatagatgtttatcgggaccggttagtgcaggccgtacccttctttttccgggtcggctcctgagctgccgtgccgtaacaagaacaagatcgggtaggctgccgactctgtgagaaattacaccaagttcaccttcaaaaatatcgggttagtatgccggagagatgttggggttatgtatttaggtgagaaattctgcgcaagaaacgcggagtagcaagagtctgatacgagtcttgccttccatttccctctccaaacttcattcgatcgaaaaaaaaagatgtttgacaatatacccccgggtcccgcagaccctttttttcatctgaagaaaaaggccgatgaagatgaccacccagacaaggttgacataggggtaggcatataccgaagcgagcaagggacctaccaggagttggctgtcgtaaaaagggtaatcatgccaaatcaagacaaagatgatgagacggttattaacgagaggtacccataggcaaagaaaatactggagcaactcgagttggggcatgatgtaatattccgcatatatcaaagatcccaaaccgcaccactaaccaataatttagtatggactcactactggggatgatcgattcctcaagctcgcagcggaagtcatgtttggccaagaaaatgaagcgttggtatcggggcgggttcgtctccacagaatatttggatcaccatatattaatttcccaaactagatcgcatccgtacaaactctctcgggtacaggagccaaccataccgctgctgtcctcatagctagactactggatccaaagccagccatctacctcggagtgcctacctggaacaacatgaagccgctctgtgagtatgccggcttagagaccatcgagtacccatacctagaccgtgagacatccgaactctccttccagccctgcatcgacgcaatcaggagtgctcctacagggagtgtatttgttctacagggctgttgccacaacccgactggcaaagacatcacattggatcagtggcagcggttcggagaggagataaaagcacggggtcacctagctttcatcgatatcgcctaccagggactcggtgatggattggatgaggacgcagcaggcgttcggatactatcacgtctcggtatcgacatgatcgtatgccaatcattctccaagaatttcgctctgtacggcgagcgctgcggagttcttcatgtagtcacacggtcagtcgaggctgcgaccaataccaaagaccagctgcggagcctaatacggcgcgaatactcctcatcgccagcgtacgggtcgcggttggttacgatcgtgctagaggatcccgagctgcgtcagcaatggtaagggacttgctagtgaatggtcgttatttctactcactgatgattgattttctataaagggttgatgaactcgcgtccatgagagcaaggttaattcagaacagacaacgactatacaaagaactgtctacgattttgcaagtaggttgtcttcccttgtgtccctatcaagattacaggcgctaacataatatactttacagacaccaggcgattggaaacatattgtggaggagaaggggctcttttcgtacatcttgtcctctcccccaaaacgagtcgccataactgaccgttgaccaggtgcctcgcgatcacccccgcacagtgcaatgccctcaatgacaactaccacgtgcatctcccggtgagcggccggatcaatgttgctgggctaaacaataataatattgagcggacagctcgtgcgatagatgcagtggtccaagggaatcgttagattgttgattggcgtctatgattgtagcataacatgtgctttgatctttctcgtatcaaagtttactagaaaaatactctatagccgacctccgaagcattattgctgataacttcaatttctcgagcataacgaagtaacaccgccttcagagcctattaacaggagggtacgatttatactctccatataaaaatagcacaaacctccccactctagaaatcaatataagttcctgaagtttaaaaatacgattctggtttacatatcgacctacctaccttttcatactaccaacttatcaaccctatcattcaggaaattcaatcaagatgctagcaacattgcatcgaaagtgacagaaactgcaaactgtggatgagccaagggacagctacccttctggggactgggatgggaaaagttgaaccgtgagaatgaggtaacaattgtcagctaggagggtaaatcacttgacagactaaccatgtcccccgtatcgctcttattgcaagatcgtttttctcgtggctgacaagaaggacagcaaatgttgtgaatacatttatacatccatatctccgatcttgatgcctgacaattcctgtaattcctgataattcaggcatcacggccttggcattttttcacactccacaccggccaatgtcaaatgaagggcgtcggcaagttcgggtccgatggcaccgaaagttttctaacatccccaatataaattgctggtcctagccaagtgtatatacttctcggatgttttagacggaaaggttttcactattcttacatattgtctcgaattgattgacaatggcgcattccgattcagaacacaaattgaagaaaccctggattgaaacgcctttgatcgagtcggcaacattctcaaaggctgccggatggtacgactgcgtttttattttccctaatcaaatttctgagctgactaaaaatgtcaatgtagtaaaattttcctcaaattggagtcgctccaaccttctggctcgttcaaatcacggtgagttcgacaatccaaaaaggaatttgatacagaatctaaactagttcaggggaattggaaacttgatcctcacatctctttctgatccatcaaacaatggcaaaaccctgcattttttcagctcctcggcaggcaatgcggggctcgcagcagttatagccgctcgagatctcggttgttcctgtactgttgttgtgcccgttagcgcgaagccaatgatgatccaaaaaatacgcgctgcaggagcttcggatgttatccgccatggcgccagttggttcgaggctgactcgtacctgcgaaagaatttcatcgaaaatgaggacagcaaatcagatcccttgaccaggaacatttatattccaccattcgatcaccctgacatctggcgcggtgcagggactctggttgatgagctagtcaagcagttacctccaaggcaccacggaaaaaccgatacctgttgtccgttcccagcagatgcaatcgtttgcagcgttggtggtggtggtcttttgaatgggattatcgacggccttgagaggcatttgccagtgcctcaaccggcaacacttccccagcaagcggcgaagaaacttcaaatcctcgccgttgaaacatccggcgcggattcgctggctcattcgctacacaagggttacttacaccctctacctgcaataacatcgcaggcaatcaccctaggggcactctgcgtggcacagcaaacactgaagaacgctcaatctcctccgcccggtatcaaagtcactagtattgtgggtaccgacgccgatgctgcgaggggagttgtgcgtttgtgtgatgagctgcggttggaggtcgagctggcttgcggaatcagtgtccaagttgggttagataggctaagggaagtcatgacagacctaacaccggatagtcgagttgtaattgttgtttgtggaggaaacgatgttagttccgaaatgattacgggttaccggcaaagttcgagagtggctggcaacgaaaaacgacgggaatcgatgttgtgaaaaatctgatgttggaactacatttggttgttgaaagatcgtgaattacctactcccctggtcagacccatctgtattgatgcttaagggtaatattatcctcttgctctcatctaacctcattccgtgtctaataatgataatcctcgttaatcccacactagcgagtctaccattgcattaagtcttcaatgcccaaatatcactgcagtcgaagagatccgtgatcctcggcttcatctagcgcatcggcaatacgcgacccctctccctcgaacagcatcccgtcgtaagtcgccgcgcctaaaacgcagccaacaataggggcgaagaggggaacaacgaaatagtagttggccgccgtaaacacctctcggccatagacgatagcagagaacaatctcgggccaaaatctctggctgggttaatggcctggttttattagtacgatttcctaacctgataacctgggaacatacataaccggtctgccagcccaatgctgctccgatcatgagcagcagcagaaagacagcgatctggggagcaggaaatcgacgggcatttccaggatcggatatgctgagaaggccgaacatcagcacagctgagcccagcatctcagaaaagacagcctcccagttcgactggaagaaggcacctgggtaggtcgagaagatgcccgctgaatggtgaccgaccgggctcaggattgatccgccgggaatggtgtattcaggatcccaagctttaatcgccgaacggtagttgatatatacgatggcagctccgacaaacccgcccaggaactgcgcagccagcttgcctgggatttgtttccattgcccttcagatggacgtacaagggcaaggcaaagagtcacggccgggttgatggtcgggccgggatcggataaatagccggatagacacacggcagcagcccaggcgaggttgatagacagccaggtgccgtagttgtagtcggagagcagacattgggcgacaactccatccccgataacgattagcagagcagtcccgagaaattcagccgcgtatggcttcagtgcccgacgagggatcatttcggtgaagatggtgttgtaatccgatgcccttcgtagatacaaggtgggatgagggacccctgattccaaccaaggttgatgtgcgtgtttacataatttaataaaccggggacggtgacgtcatattgctcggatcttcctccgatatgcccaatacgggatgccgattctcccgatatgggaacaagttgttgtcccaaggtgatcaaatggggtttctactgtactgcttttgcacccagtcttcgccgacacagaatactcgactacatatttatgcactaatatgtgattttctgcaagtgaaatctagtataaatggcacttgcattgtaacaacttgagagttctaatctctttcatactaccgactcacctaaatctatcggtctgaagaatgcaatcatcatactagcaagcctatatcaaaaacgatagaaaccgcaagtagtcacctataccaagatcaagggatgcctatcatacatcttcaatatcaaaccgcatgttcaggcgttgaaggtattcaccatcatggaaagtaacgatcctagcaattcgttttctgccttggccccacgcacacagaacaaaagctgcaaccgtcttaccaattgcagtacccagcagggcatcaaactcgcacgagggagtccagatccggtgttcactagaagggtactcaatcccctcggttctatacacttcatcacgaacacactgtaccgtgtcagtttcaaaaatagaagtaacgaatacatattcaagactgttaagcgaaaaatccatctcataggcagccttagttaattctgatatatgtggagcggtgcttcgccttgatcgacggatccagtcaaggaagaccaccccttgtccagtgcgtccctcccagcccaccggtggaccttgtcgattatggatttctatcttgttaagctcatctggtagatcaaaagggtagatgcaggtatcccatgctgaatcccaccatacagcttcgtgggtgacagaataattctggggttggggatcatatgtcacagcgaatgtggatctagggtaagggcacccgggctcatgttcacgttcaatccatcttcgtaggcttcgtcctttttcttcccatggaaagtatctaggcattatgggttaggggctaagagatagttaggagaaaaggcctcgaataatactcaccaactcgtcaattaaactggatttgcagacgctatctagtacctggctttatatctccgatatcacagactgaggacagagaaggtccataaataccattgtttgaataaactctaagtaaaggacgagtacaaaggataccactatttaaggggaaacaataagcctggaaataaaggaatctgctagagagtgaaacaggtgttagctaaataaagcactggtatcttttggagatagtaattgattctcattctgtttatttcagtgaaggttctatttgagtaagattgaatgggcgttttattgggcataccaagttacttcttgttctctttcgtcattttgttccatattgttttctgaccaatttggcataagatgattattggaaatagctagtccagaataacccaaaactcctacgcgaatttcccgatacctggcttggaactaaggtccgttcaatttgaagatactgccatgatcaccagctacttgattagaactcactcaatagtgtaccatttgctagcaaaagaatgctgaacccgggtcaggttgtttttgaaggtgctcacaagaactatatatcctccgagggcgttattatctagcctgatgtcttcttctgctcccatatgtcttcccaggggtttgatattaattgcacccctgatcaaattttaaaccactcaattgagcagcattgaatatatttccctatatcagaccataacatacctgaagttaataaaaccgtgatgtttatactcccacaccgtcgtggcagaatcaaacatgcgccaaacccctttaggccaagcgccccaatgatagccaagcatccaaacaatccacgtagattgcaaggagagtcctctaagcatcccacaagcataatcatatctgctatccagacccaataaaggtatgtgaatatatctaccctgtttgaaagagactatccgcaccaattcgtccctaaatgcgccccttctccccgcattgcttcggggtcgcgcgcataccccgtggtatttaggccatgatgtcagcccaatggagtgtctacacgcgtcaaagtttgagtcaatctgcttgtatactaacaaaattctctatatagcgccctcaaacattcaaacctacctgccgcgttcaattaattcacaatgtctgtcgaagcctcagcatcggtacgttaatcgcagatgacaccacagcccgcgacatatcaatccgcaactaggctgcaagaatacgcactgccattacattgtcacaaacggtcctaacaaccctccagcccatccctattgaggatctcactaagatcaccaccgaggtacggccgttccccagaataccccgtagaatcaaccccgcgctaacattttactctaggcctgttcggatgccctcaagacaagccagagctacgagcatgacaatgtcggaacctggaactcccagattatcgtaagcactaacacccaaccgcgcaatagcgatactaacaattccccgcgcagaacaccgtccttaaggccctgatctccgctaccgcacctaccgatgcctccaagcctcctccctaccgcttcaccgtgaacagcacaatcgtgcagcagggcgtgattgacccgtccatcgccgagggtggcgcactcagcaatgccggtaagcgtggtatgcattccgcctccggggccttttgggatgtcaaccgcgatggcatgtggactttcaagtacactggtgctgaggagcgcgggattgatgttgttgtttgtgtgacatggtttgccgtcgtataaggacgggcctgattttttttttggcctgttctatgatgagcatatccatggatggcataaaagtccataagcggaggtcgtgactttgtctgtgagaagttccttgaactccttatcggctttgtatcacgggcttcatctttctttttcatgtacttgaacatgtgtttttagtgctctgggtatgttcagatctgctcttctctttctcgtgtcatttgatttgagttcggtctaagcgtggtgttatgtttcttctagtttagacttgctggtattcttcgagaaattggatagccttgcaaatgtctatgggacatccatggatgttacccagtatgtatacatagtgcggagaaagaaaacttggcatagatattggaattgttagtggtatctcaagactatgcaggatcctctgtgggatgaaactatggtaagtaaaaatgtctgcagaacaattcaacgacaaaggtctccattgaccagccgaaatacgccatgtaaccaggaaaaattgggaaacacccatcattgcttgcgccatgccatgtgtagattacccataataatgtcaacgccagtaaagacccatcaatcatgaaagcaaaacgccagttagttgagataactcaaccttgcatcttgcccctagcgaggctccgaatagtcatttaaagcaacacaaacggaacctcgatgatggccgctgtactggcggatgatgttgccagtgccgagctcccacagacgggcgtagtgatcactggagacagtcacgaggtatgcactgtctgcagagaaagcgcagtcccaaacccagcgctggtgattggcgagggtggtctctaggaacagtgtgtggttgactggatccataggaggcccgtcgggggatgaggtgaatgtctgttgcggtgtctcttggcgaggagggttgtcggtaatacggaggagatcacggtcttggacgggtgcgtcgaaaatgcgaagcagatcccgagattgggcgggaacctcgacaggggttaccggagcttccaccggtgctgcttcaactgtcgggttcaatgcctcattctccttccattgctgtaatgccagtttggcaggtggaaattcagcgtcgaggttccaaaccttggcagtatgatccgcagagcaagttgcaagatgcttgacatcgggagagaggagaacacgagtgagatagtccttatgcgcttggaaggtacagacggggatgattcgggtggtttcctcagtttggaccatgcgccacaagtagacgttgccctgttgaggtattagtaaagaatcataatatctgccgtgaaacaaaatcacgcaccttcttgtttccagcgcaaagcaaggatccatcactggcaacgctgacactgagaaccgcagtgtcctcctccggaatcaattgatgagtacagacactctcgcccaaatcccagacacgaaccataccggcgtggtcaccgctgatgagctcgccctggttaggatgaatgaccacatcattgaccggagcccgatgaacgtagtttcgctgcaagctaccggtacgggtgtcccagacttttacagttccgtcctcggagctggtaaccatccattttccctcgcagtggaatgccacgccggtgatgttgcttgtgtgaccttcgaaggtaatcacggggttaggattggttgacttgatgtcaaagagtttgacattgttatgacccgcagcagccaggaatctcttatccggggtgatgcaaagacgattgacttgggagtctggatgctggattgtacgtgaacagatacccgagagcgcttcccaaaagctagcagagaaatagtcagcaagagtcccggtatgaattatcgctctgtgggtgctggataaacactgcacgcagctaactaagtgccaacttaccgaatggtatggtcgtaccccgctaaaatatgcaaccaaggtaattagcttaatgcctagaagaatgcggggagcttcttatgatattccacttaccggtgcatagaatgacactcatattcgccttagttgggttcaaatgaatgtagcggggaagtaattgatcttcgtggcctcgttctgggtacctctggagtcccttgaggcgttacgggagctgtcaaggcgagacggcccagaccgaacgtaggatggagtcccgtttactgccattaccaccacgtgattatagatccacgtgagcaaagcggtgtcgctgtgtgacgataaggcgataaggcgagggcggtaaaaaggcggtgaagctgaaagggcaggcggtcaaaaaggtgcaaagaactagttacgcattattgcttgtctaacaagatccgttaatgattttatagataagctaataactctgctctagaaatttgtctaattttatacaattgaacaatatcttgtgtgaattcttcgtgttgtcaaacttactctatctctagtccctgaactagattgggcggtacgtccagcggtgctcggagttaacatattattggccaaaaataagttaaatctccagcagaataattgattggccggcagaaaaaaaaacataccgatgtagtcaaacaagtatgtatttgtcgtctctattgagctgtattgatccctattggactccattgtttggtgtaagacaatagaaatgtcactttctttgttcttgtttgcttccattttgcctgtctatgagccctaattccctcctcggttattaccatccctcctctttgatccctccacaacatcttcttgttttccctaccctcttcaatatttataaacttaatgctcatttctaattacaatggctctaattgaccccaaccagcctggctttgggcttgaccagcctgactttgggcttgaccagcctgctttcgaccccgaggcctttctcaatagcctcaccagtctcgatgccaatgtatcttctaatgcttctaatgacttcgagcattatcaaatccccgagctcttgtgcagtttcgatgaatttttcgccagtattcctctcgatgacctcgatcagtctggttttggacagtccagttcagccacatctgtcaactgctttacccaaccactatccagcaacatccctgcccaggcaccctacaggcagatgccatacgacccctcgatcggtattgcatacacctcggaggacactgacgcctccaaggtccgaagttgggagaacctcatcgcccaggccaatttggtcaatgctggcgtgccaccctctactcctcagatcatggaagaggagacagccagccaaggcctccagactatggactcgcccgactctctgttcaactctcctggcacccagtctgtcgcgagtgtcgagagtgtcgagattgttgagactcccagtcccacctcgtcgactccttgccctccccgagctcctgcagctacaactacaccttcgaatgccgcgacaaatgtgattgtaagttcttatttatgattgaccatttcattagaaatatgtcctgactgtctttcacaggcaagcgccattcctagccccaatcctcgcgccgtgcagcttccgcaagcgttgacgaaccagaagggctatgcccaacacgtttcaccattcgcacctgttgcaacaattgctcctcctatctcctcgatgaactctcgcgagcttgagaacgcgcgcgctcgaattcagaccttggctagagaacgcaactactaccaacgtaatttgcggaaggcgaccaatattgaccctaaatcgggcaagaccagtcttcagctgctacaagcggagaatgtgaaccttcgtcgggccaactccaagcaatcccaagaaatccagagaatgaagaatgaggccgaagcagccaaagtgtcgtatgcgacactggctgagtactacaacgatagcctcaagcagctgcacaaagcggagcttgagttggaacagctgaggaaataggaacccaagtcgtatgtagctttgaaaagatgttcacatgcccaacatatgtcttctgagacgcaagtgtgtccttatctttgtgcttagccttcctccgagactctttctacattgaatacaactatgtcttatgttttctctgcccttaggatttctaggatctaaaagtcaaccataaagctccatagataatccgtgattgagttaatttttgtactaggcagcttcccagtgagaactttattctgactgttgatcgatttcaactgtgatatcacatagaaagatcagagcgttgaacaaaacaaccatgttcctcattatacaaaactgtcgatacgagtgcaaatgcctcatattgggcaacatcacgaagtaacagcacggccagctggcccgacggcaaggcgcttaactactaatcaaaagattaaaggtgatccctacgtcggtcacctttttttggtttcctagcttatatgacccactagtcaacatacgtcatgcctgaatatgtatctcgtcatggcggattcgaggagacccgtcggtctatcaggccgaacagcctgtcaccggattgcctgttgctacgaagtaatagaagaagcccggaagtcagtatccccatacttcatcttcatccttcatgtttgatgcagcgcttaacaaagcaaaagtactaactccctcacagaattgagaatactgaaccgagatgtctgataaggataaagatatcaaaatccacacatgggatgggcccgatgaccccgagaatcccttcaattggagcttcagatacaaatgggtgataacgattaccgtttgcttcatgtaagaaatgccatctcaacacaaaatacataattttaagcatcaaaataacatcctcaccagctccatcctgacaggaatccccgcaggaagctacggctccggcaacgactggttgaagcaagaattcaatgtccaaaacacccccttcccaaacctctactgggccaccacttcctggaacatgggcgccgccttctggccactgattttcgtccctctgacagagtcctccggccgcatgccaggatacttcgtggcgtatatactcctcgtcatttcgctcttcccatccgcgttcgcaaagaacttcgcgacactcatcgtgactcggttcttcggtggaggtgcttcttccaccgcgattaatattgtcgggggaagtatctccgatgtgtggttcggtaacgaggctcgcagtctgcccatgtctatattcggatttacgagtgttgtcggtatttcacttggtccatttattggatcttctattgtgcagattcatagatcacacccatggcgttggtaagcacaacttgcatttccgaatatcaatttccaaaatcccatcatgctgaccacctcccacgtaggatcttctacatccaaattatctacaacgcagccttgatcccggtcttttggctaatactcaaagaaacccgcccagaagtgatccttaagaagcgcgcaaagaagatccgcaaagaaacaaacctccccatctacgcctcttccgaactagatgccccaagcaaactcaatctcttgagactctccttccaacgcccaacacacatgctcatagccgagccggtcgtgaccttcttcactttatggataagtttcgcctgggggatcctgttcctcttcttttccagcgtcgtgcaaacctactccacaaactacaactggggtacgatgtcaacaggcctgatacagctcgccatctcggtgggtgcggtcatcgggacagtcatcaacccgctgcaggactggattcatctccgctctgagcggcataataaagagaacccggggaaacctatccctgaggcgagactgtacacatctatcccgggtagtctgctatttgcggcgggtttgttctggtacggctgggctagtcagccgcatgttcattggatcgtgccgactatcggtgttacggcgacagggattgggatctattcgatttatatggctgttgttaattatttgactgatgcttatgagcgttatgcggcatcggctttgtcggctgcttcgcttgggaggaatacttttggtgcgttcttgccgcttgcttcgccgcagttgttctccaatctcgggtatggatgggcggggactttgcttgggtttattgggattgcgttgtctgtcgtgcctgttgttttggtttggaaaggcccggagattcggaggaggagcaagtttatgagggaggcgatgtgggagccttcgcagaggccgggctagattgatcgtgggaggtaaatatgtatagagtaaacacatgaatttattgttttattttgttcttatgtccatctaatggccattctctattgtaaaatgccaagagggtagtatagaaagacaagaaaccaaaagccacaacttcctccacatgttctatcaactctgaatccaaggtgaaaaggatagtggaagagggtatcggggcaaaggggtcaaggtcaggggggaatggccgtccacatggatgttgcttttgggaaatactttcgctatcaaacattcaaccacaacaagcacgaaaattttatttttcagcgcgcatggtgcggaagaaatccatgacactagtgtaaacaacaagcaaaataccaccaccagggccgagacgcaggaccttgggcgtgaagcccttgtacagagcagcgaagccctcctccttcatcacagtaccgagagcaggccaagcccagttgtacttggcgacctgaccggggaccttggaagtgttctggatgcgggacttaacaacatccattggggtgttgacgacagtaccgacgataccaccaatgctaccggcaatcaggtcgttgcgagtctgctggttcttgttgccgggctcgacggcgggcagctgagcgcggacctggaagatacagccgaagtaaccggcgttccacagaatgtggcgccacatggtcgactcaaggccgttgtacattgccagcgggccttctgcggccacgatctttctcacaacgtcgatcatgccgttgtacttgtgggcctgtgccttgtcctgaagacggatcttcaccagctcaaaaggaaccacgacaaaagcttcagtagctccggctgtggctccggtcagggtagccagtccttgggtctgcttgtccacaccgaacaggttgcggtagaaagcaccccagctgtcgttggcggcgaacttggtcgcacgcttcggcgcctccatcaggatgggcgcggaaataccacggtatagacgagaagcactttatacggtgtcgcatgttagagagagagccgtggctgcgtcgctggagtgatgacatacccctcgttcttgacaatcttacggaagcagtcgaacatgccattgtagtaatccgcaccgggaacagcgggtccagactgaagctgactgcaagaggatatcgttagcccgtgtcatataaagtccgtgtttattgcgaccggcggcttgcttacattcgagtcttgagcacgtccagagggtacctgcgagtcacatatcgtcaattgggtccaattttcacactgtaccaagcatatctccaacagaagcacttatgagaccaaggaaaggaagtggatagccgtacatgatcaggatctgctcgtgcggggagacatgttagtcaatagaacatctcttggggggggggggggggtccgacaggaggannnnnnnnnnnnnnnnnnnnnnnnnnnnnnnnnnnnnnnnnnnnnnnnnnnnnnnnnnnnnnnnnnnnnnnnnnnnnnnnnnnnnnnnnnnnnnnnnnnnnnnnnnnnnnnnnnnnnnnnnnnnnnnnnnnnnnnnnnnnnnnnnnnnnnnnnnnnnnnnnnnnnnnnnnnnnnnnnnnnnnnnnnnnnnnnnnnnnnnncgggggggggggggggggggttccgacatgacgaatcaagtcggtatcgtttttcaaagtagaagcaaaagatacatacctctgagacaccagccaccgcaccggcggcgaactggtagacgaaggggaggggcttctggggagtttcagacatgatggcggcttgagctgggatgtcagtacggggccttaattgggtaatattgggatcgaaaagtcatcgaaaaacacagctttgcgatcagatcacgacatatttactcacaagaccttaaagaacgagggctggagaaggaagaagtgagaagagatgaggttgccggtgtcggcgagaatcggtgatcgggtccgagtgcagcagccggtaagcctccgcctgtacgtttagcccgattactaaacccccgtggggagagcttctataaaattcacattccgaactgtttgcagctttattgtcataaattcatgtgcatcgtgtcttctcctgtcttttttataacatccaaaatcctacacacatccccagcgtcatccccaacatcattttgctaatccgatgcactacaccatctccgctagcagcagtcgcagtcgcctgttccttggtgacagttgtcgcagatgcggtgtctgttgcagtacagctagaaccacaagcgaaccccgtgggacagcatcctccacccacggtgtcggcacaacggaaccagccctgagcgcacaggttcccaccagaacgttccgttgttgtcgcgacgggcgctacaatcgtcacaccgtctgatgtcatagtcgtcgaagatgtggtcgggcatgatgtcgtatcgcagtctcgtccagtacggcagcagccaccttggtagacagcggagcaggcatagaaaccagtcgggcagacatcgctggttactgttgacaggttcgtaggccgtgctggtggtgccaagctttcgtctgttgtggatgtgccgctttgggaagaggttgtcgaggaagtcgaagtcgaagtcgaagtggaggttgaagtggaaattgaagtggaagtactatccggcttggtcgaataggtcacagtagacaacatcacggtcgaatgaagagtcaccgtaataacagtgatgtatgcgcctactcaaccaatcagcaaaaggttcatattcccaattcccatcaacaatctgggaatattcacttacatcctccttcaacacaatcatatcccgggatacaacacccaccccccaaagcctgcgaacaagccgtatacccactctcacacgacccaatagtcccagagcacgtctgccagctaggacagcagcccacatcgccgttccctgtatcagcaacaatctcgcacgtctccccggacccacagcagcgatcggatcgaccgatggatgtgcaccccaatgtcccagtcgggcacttgaaatctcgtttttcaaacaaattgtttgcgctattgttttctcggggaaggtactgactgtattcatctgtgctcggggagtaagatggcccgaatgggtatgattgggccacaaagcgcgctggtgaaaatccttcttcctcggagaagtgtcgctcagatatgttacttgacgaagaggcctctccaaaactccagtagtcgaggaagaatttctcgccttcgttctcgctcattttcttcacgccgagagctggtcctgatgcgagctgggatgctatagcggcattgcgctgtatgacgatttttgccggcagcgatcgcgtgttagtttctttggattctcgctccgcagagggatttgtattttctgctaagaccagtgttgcaaactgtggcagtgagcagaacacggcgagggcgtggaggagctgcatactgcctcttgggtatcgcgatcaggatcgatgtcgagtttgtttaggctgagaccagtgaaatcagtcgggttgaaggctaacttgcagttcgatagttgtctcaaatatgcgtttgtttcactaacaaaagtagtggatggcttggttgggaatgaaacttcgagttgagttgatgcgaatatatattctcctttaagattcaatttagttgaattcgacagatttaatgaaagaggctttgtcggactaggaataattaagggcgcattgggctttctataaagctgcatataaaggtggctgggaatgcacaccgctacgcattagcttgcagaacagacatgtcaagatgtggagtacaacaacaagtcagtggaaacttttttattggctgatttcggcattgaagattattctctgtcttggtcgacgtggtacgatatcaagagacagactacttccacctaaccaaataagaattatttaacaccgacttcaaaggtgctcatatcatttgcaaaatcaaagactaaatgctagcagcacaccacagagtatggcagggtatcgtcagtaaatgacatgacatgggaggctctcgcacaggaaacacgccaaaaggtatcaacggaaatgaaagaaacaaaactaaggcctcaatgcaatgtcgaatgcagcaaacaaaaacaaaagcaaaaacaaatacgtatggaaccaatttcacttgcacttagcaataaatgattcgacatgaaagctcactgggtcggggatgatcagaccgaggttgcgtacaatacgggatcaagtagagggatgttcggggtcagctttgtcttcctcctcaggcgctgtagggagtggcttgtccgtgtcagaagatggagacttgggctcttctgcctcctctgcctcatctccatcctccggtttcgcctcatttccaccttcttcttggtcgtcatcgcctccgccctcgttgttttgctcagctgcctgctcagctgcctgcacagcagcggcctctgcttctgccttctccatctcggcattgcgggcttgctgtcgatcccaaacttctttacggatgcggtcgtcttttgcagtacgaaggcgctcagtctcctcgaagccaccgctcttcttcaatttgccttcgtcgacaaatgcaccaagttccttctggaaaagaccgattcgccgagtctcaagttccttctttcgtgctttctccgctcgctcaatggcctcgagtcggctttcgtggtttggttgcaaagcacgaacttcacccaggacaccatccttggctttcatgggatcaacagttgggtcaattccaagactcctggatggggcgcggacagcggtgctaccggttgcatttgtcaagacctgctccttggtagcttgctccaccagggcaaaggtctgagtcgccttctcgagatcatcttgcaagtcggcggcgagatcttcctgcatggtaagctggtctcgttcttcgcaaaccagttgtagctccttttcccagatcttggtccagacgggcttctcgcgagccaggaagtcctgcattttcttgatttctttcatcaccaagctaatgtcacggccgacaccttccaattgtcttggaagaggacgaacaccgcgggtcacaacatcctttcgaagatcctcaaccaaatcttggaggtcatcgacgcgagcgaccagccgctccgattcaccggcaagttctttcttaccagtgttgacgcgagcacgcccagcatcaccttcataagtgggagtggaaatgtcactagcaacggtcttgaccttgcttgccttggcacggactgcgctcatagaaccggtaatatcggatgtaaagttagagtaggtctgacgcaggacagccaaatcacgacgcaagctctgaagctcggcgatttgagttccgctacccacaatcgatgccttggaattccctccaacggcagccaggctagaggttgctggtggagcagcagacaaacgagcaatttctttggctgcttcaagctgacgatctgaaacccgctggatgatatttccttggccagcaagcgtctctttaacaccttcgaccaggaggcgtacgcttccgaggccgtcgtcgaaatgtttctttacctcatcgagattgtcaacattaagcactaacacagaccgatctttgacatcggtaagatcttctagttcatgtcggatgcctgaaattgggtcttggatataaatttctggcaaatcaacgccattgtcgtgggtattccaggcaaatttttcaataaaagcaagctgcagacgcccaatggtgagctctgcaatgccatcagggagcacatacttcttaattttgcttttatattgtaggaacagcgtcagctctttgcccggcgaaggttgctcagtagcaaattgaatagctgataacggtgttgcgatctcggacagttcaaaggtgtcctccttcggggtttgcggtgctggttttgcggactcaaaagcctcttccaaggttggcttctcctggggtagggggagaatcgaaggaggaacaatggtagattccacagtatcatctttcaccttatgagcatccggttcatttggcacctcgagtggtgtgttgtcgatctcttgtggctcaaatggaggcgcaggtggaggagtgcgttcttcttccacgacattcggaatatttgcgggtggaggagcttgcgcaaccttagcgacttcctgtaaacgattgttggatcgttgtcgtgtatgagtaaatgaacctcgcagacggactgcgttcaaggattcgcggacatcacgaccgcgattgggaataggagagttctgagtaggcaggacaggaacaccatttgtagatgtacctaaatgtttctggatctgataagcggagaatcgacgcgaggcacgtcgctcaagctctccacttctctgcaaagcccccaatgcgtcatcctccttcggcgggggtggaggtggaggcgcagaaaacccggtgggtgtaatatatgaaggtgcagtggtgttcgatgtgttggctcgaggggttgtatcattatcgaagggcgtgggttgagacagcatttgctgggcctctcgtcgcgatagttctctttcggcgtagttcgtcgtccgcggttcggttatcgaaggtgccgaggatgttcgagcaatggacggtggatcctccagcgatccgctgccataccgtctgtttgatcgtctgggagacgactgggatgttgacggcatggtggatgctgcagcttcatcatacagttgacctatgggctgcccactagcgatgcttcctgcactggcttgccgtcctggtgcggagcggccatcttcgcgctggtgccgggaccttaagcgagcttgcttcttcttcagcccttttaacaagttgatgattatatctcgaattctgggaaggtatctatcgaggctctgggaagatgcatcttgactaagagtgtcttcaagtatggtgcgcagcaggtctggtacgggaccgaggtctgaagtgtcgactccgatggcactgaaggcgcgacaggccaaattaaattcatagcccaatcgaacgtatacatctgacacgtcgttctccgatgcttgctttcgagaccattgggttaaggtttcgaggagttgttttgtcgcaaccaagaggtgcgtcacgctcttttcgatttgggatatttgcttatcgggctgtgcggtggggggaaacaccagttcattagccaccgtactgtaggcaattaacaggccgccatagtcatacctgagtcttgctagactgagatcgcgccgaggcggaggaactgcggccggactgctgggaagccatggatgtgtcggcactgccagaccccgagggtcgctcgggggatgcttgttgaaccaactgttcgggataagggaactgggctcttgacacgtctgaggactgcatgagtatgataggccaaatttccgagggagtgagaatagaaagtgagaaatagggcagaagcgagtgagagtgccaagcatgtgtgaagatgatgcccagcctcctgtcaacttggggccttaccgcacgcgaaccgatgatcagtaacggttcaaccccccaataccataaatactatatattactgtatagccctgtaatgatgtacaagggaccggacaacgcgttacccgcctattcaggccacagtaggtagttttatgtagctagtacatatatggactcgtgctattgatccttgacaattgcgaattggcctccaatttgatgccatcaaatcacatgcttatgctacctgcattttaagaatcaaaatacatcgaacatctacaaatacaacaaaacatcatccctcaccgcatccactgataagtacccgattgataagacccttgcctttgtccttcagctccactctggctctatttatattcctgcatgttgtacggagacacttatttgtgttgtaggatgatgggccaagtcatttgatcgtattcctacatcattatttagatctcctgtgtaggactcactgctttcttttccataggagcatgaatatcaaaccaagtatggtacctgctaaccctaatatggcagcccaaccaacttaacgcctaactccatcccagccacagaagtaaagtagacttcgacaataactaggttagaactgaagactggaacctaaggggaaaatgatcattcctgaagataggtgtttacctgatttaccaagtccaaaggggctaatcaacgttcgaatccaacggaggcacgaacagacattgggccatagccacttgatgagttttcttcaaacaactttaacaaatatagatcagcgatctaagctgtgcggcttccactatcccggtgatccgagacaggaactactacttcagacgctaacgatgttggctccgaatggtgagaataaactggaggccgcaaccctatattgtatgcaggtacctacctaggtatgtaactagagccccagttgattacatgcataagataaattcaacacctaactagttagttagttaactaactaggcacatggcgaaatataataatcttaatttgcggtagcggtacgatatatattcgacctaactaggtagcgggcctagctctgaccgttataaaatggcagctaagacaggaaagccccacccgacagtggaagttcccatggaaccaaatatgtatcgtgactctggacctatgacctcaggtatgacatctggagctagtcgacggatggtatatgtgtatatatagttactctactaggaagtgtaactgaagcaagatacgaagttgcataatacctagtatggacatatgtacggagtatgtatgtgttgttatttcaactatgacacaagacctcgggacgtaattgaccaacaatgcagttgatcgcgtaagatgatgcatacatcagtacatttggtacttccactactccatagctgctttatgcatcggaagtaaataaatcttaatggattcatgggttctgaccctagatcgcacaatgccatctttctacctttaaactctatggacatgggagctacctcagcctgacccgtactctgtcagtaacattggcaattggccgatcctagttggaggcccaatagcacagaatacttagaataacaataccgattgtccatttgacaatatccattgggacatgaagtcaccaagccagggaaaaataaaaataaaaataaaaagggtgtaacacacaaatacaataccatacgcgtgacttctctccagaatccctttcttcccctatcaacttgcaacaagcccatttctctttcttctatttctctgtctttctttcctttcccttccattccccttttttcatcctcctgccattggcattccggtatctccgcagtgtggtggttgcttatccttccccctcactttccccccagtcctatttgtgcaggcggtgtgttgtggcatcgtgcctcatcctagcggctttccgccgagcgaagttccacgacgcaagcttgccctgactgacatcaaagtcaatcaatggcctccgctcttaactctgtgccggctaatcacgcgtctggcaatgccagcgcgggtgcccctagcaccggtcgatctaccctgagatccagtaacagcacgaaggggtctgacaaccgacgacagtcaggcagccccgtcgatggcggacaacggtatgatcagcccttccttctacacaaatgtcaaatcaaatcctcgtgtaattccatatcctctcggacttgggaaactcccctttgttattatcctacccttcccttgtccggctggcgattgagctggtgagctctgttgcatgcctgcttcgagttgtgcgccagcaagagccaattgaagctgtcggattcgatggcagaattgttttgtcgttctctgcttcgtgaccagtggccactaacgcaagcatgttctactgcataggcgcacaaactcccacaaggcctggacccaagggaccaaccccatcactcaacgatcctcatacactccatcgaacggcaacatggcccaccagaaacagtctgggtccccgagacccaaccagaaggagtcaaacactcctgataaccatgcccatgaccgcctggtcttcttattcgccagcttcattgtaagcctagtcgcgccaccatacccgttgatcaattctaacctgctacctagggtctacacaccaccattaccaccaaatccggagacaagtttaccggtatcttctcttcgtcgaccatggagcctaccgaactttcgttcctgctcaagatggtccagcgaacctcgcaagaggcccaaccccgggcaaacggcgtcagcgatgtcgcaactccgtacataggctccgcgcccgagcacatcatgtcattcgatatcaaggatatcgccgacattgccgttccaaacgttaccacagccgaagtttcagccaaggaaccaaatggtacgggttgctttttttaatcggattagtctgtgcatatactaacctagtccacaggtgcttcccagggtttcagaactgacagtgatatctctggaaacttagccatgcgagagcggaccctgcagcgctgggaacctgccgagactgacgttgatatgtcactcgaaacaagtaacacttctgcgggatgggaccagttcgaggcaaacgagcgtcttttcggcaccaagaccaactacgatgagaacatctacaccactcgcctcgaccgttcggatcccaattacaaacagaagcaagcggaggcagcccggatcgctcgtgagatcgagggacaagatgtggacaactcccacatgcgcgaggagcgtggccttgtagcaccggatactggcgaccaagacgaagaagacaagtacagtggtgttcgacgcgaagacaaaaccttccctcccctgctttccggtcagccaaacaagtacatgcctcccggacgccgccaggcagctccccagcctgctgcgacgcccactgcacccaccaaacagcctgttgcttcccctatccccatcccatctccggccgtggccaagggagttgtaccttcacaccagcaagctgagccggtcgcatcgctgcagcccacagcagatatcgagcgaaagagtacctcgggcaagggcgtcattcccgcagtacctactgtatccgcagtatcagctggaaagcggcctgcacctgaaaatgcgactgcaaacgtggaggtagaggtgctggatcatttccgacagttcgcgaatagtgagaaaatgaagatgcaggagcgccgtcgcaaccaagcctcatatgaccgaaccatgaaactcaacgagctgctgaagttttccaagagtttcaaactttcgactccggtgccgaaagaccttgttcccatcctggccaaggaccggcaaaagcaggaagcaatcatgcaacgagggctgcaacagggggatgataaggcgataccgaaggtcactacacctcccacagaacagctacctgttcgtgccggacctagtggatctgtacccccatctgcaccagctgatcgtcaaaactacaaccgcacccgtcagggttatccgcccactgggcctcttgctggtgggagattccctcagcaagtagttccgcccggacgtcctggtgttggcatgctcagccatcgtctagcggacaatctgcagcaacgaaagggcgcgggaatggggcctgtccccactcctcttcccattcaagatgctcgtggaacacccactggtcctgccagcgaccagcagagaatcaccagccctgtcaagtcacaggccgggtcttccgcggcaaccaagttcaatgtcaaagctatggagttcaagccaaaccccgcagcgagcacttttacgcccggttcctcgggcgctgctgcaagcccacggtctttctctcgcaaccgctctgtgtcacgcgccacaacgccaactgcgttcttcggcccaaggaagccactgcctgtctctgaacgaccctcgatcagtgatcagttcaatcccatcaagcgcatgaagaaggagaacgcagagactactgaaaggttgattgtgttgaatggaggtattccaccaccctacaagactttgccaacttgggacatcgcggatggcagcgaagataagacgtacgatcagatgttcaaacagcctgttggcgtgccgacagtatcgcctcagggtcggtccgcctcccacaacaccaatattccccagcagcatcagctgcccttccacttccagcaaggtaacccagccatgccgccatcttctggtcctacgaatggaccccatggtcttcactctcagggcccccatggcccctcccatgtggatgatcatcaccgcatgcagttgtccgcctctaactcccaggttttcccgtccccgcggatgcaacatggatatccgtcccctatggcttcccatgcccagctttctttcgcacaaccggtccctcagttttacggtggcccccaacccggtcacatgagacctttccagggtggtgggcctcagtttgtgaatggcgctcctatgatggtgcagcaggtctcaaatggaccctacatgggagtcccgcagggcatgactccgtataacgcacagatgcccatgtactccccgaacccgggccacgcctacccccaacatacacctcaaccgcatagcgggtacccaagcccgagccgtggtgcaccgatgatgatgcaccagaactcgcaatccggacagcctcctcaatcactaatgtttatgcctggccaacccggatatccccagcagtccggacatagtgagtgtggctacagtcccccatcaagcaactccagtttttaaccaacccagtgcctcccaaccgtggcaactacccacagcagcctcacttttcctcaagccctcatcaaccgcatcatttcccacctaaccagcaccggacacccagcaatggcttcaaccaaatgcctcaattgccaccccaaatgtctgccaataccccagccacaacccctggagcttcccatccggccgaggcaacggatgaaggaaaatgaactacacgaatcatgaagccgtgagcggccccctcaaatgatgctacatcttattgcttagctgtgacttgtccgtgctctgcattatcggcaaccgccaaataccccggttactcttccatgaccgatcctcatctgttttccccgtcatcgacgcggtcttcaaaacatttgaattctgcggtgaacttcatgtggtctcaagacttgctcggtgagtgaacagtttcgtagtcttgagaacatgcgagcaacacccgctaaccacgtgatcagacatgacagatcaatctactagttgtgcctatctattttccagatatcgatctggtggtgtacatggaacgaatttctaggcgatgaacccgttgaaatcgatcacttgatatccgacctagctcatcgttgtatgcctactagtgcacaacatctccacatacgtcatcgtcgagttgaagtcttgagggtttctccatacctgagatggcctcttccttctgattctctcttatccagtttctttttttttcgtttatctcttctcttgctttcttctcggttgttggttggagggctgtgtgtccccttggtgggctcactggcctttctacctttgatggagggaagtgaggtctgcggtgggttgcgttacggcatggagacaatgcttggtcggatggtgatgtgggtgaaggtgatcggtctgggcgagcaagcggagcagtgagacgtggttgaagatgtgggaacttgataatagagatagctcgacccatggccaactggcaatgaaatggttatctcatgaaaatttctccatcattctgtgtagtcggccgctcatgcggtcgtgtcatgtctgtttcagatattctattcctcttctcggttttatagctggacggcaagcaaaggagaaaaaaagatgtgcagacaattctctatactatattataaattttgaccaaataaaactccccaatatcaccacccgtatccatattcaacatacaaaccaaatatcgggaattctagataactgttacagatgtcagcagctgcaaatgacctcatttcaaataaaaaagtagtcaagtacaggggaaaaagtctcctcaggcttaatttcaacagtgtcatcatccaagccacagacaccagacatcaacccaccgcggtgctttatcccattgcaagctcctctgaccacactctaggcataaacaagcctcagaacaaaccccctaaaccccaccaagcatcacaaaaaccaaccacgtccagcccacaccccaactaacacacctctccgtctcccaacttccaaacccccacagcaacatgcccacaccactctccacagcagatgaaaaagagaaaaggaagaagagagagaaagagtagccaggaatgacaattcctaggcaatcagagagaagactatagagatgtccgtatcccgcaaagccaacagaacgccgccagcaagaacacgtccaaccccaagccctcgcaaagaacaccataagaatgccatccagccacccaagtcccctcttccccctaatcccgaaaccctcgcaccctttacgccacagccattggtcgcccacccgtcctcatggaagcgaagcggacacggcaaccccagatagcggcgccacctccccgtttcccgcactttctcgcactaaagacccgacaccgtacacgctatcaccctaaccctaggatatgatcccaaggcggacctcaacaatgcaatactgctatatgcaatgatattacagtaattgaaagcgagatctcggcaatgagcgcgcaggcgccaagcccagctgcggccatgcctcgggacggacggaaatgtaaatgtacacaatgtctcccatgatccaggaccaacgccgctttgtccgacgtggccgcgagccatgggggtgctggctaggatctcgatgctgctttccagcaatccgacgggagacgtaagcgttctgctggaagagtggggggaatggtgttatgtgaagttggttatcgagagtgtgatcggaggagggtgtcgtcgtggtctgggcacagctctatggtggtgtggcaccatcatggctggtccaacagacagtagtctgctggaaagagatagttgattcgtgcgcacgaggtggtagctcttgaggtttgctcctagccggtttgtggtattgcgtgggttttagaacttgcgggagtaccatcggttttgctgggtgagtcttcttttgcggtgttgtggtcatggtctgaccttttaccagagttcgcatcattggagagggcgacttgcgtcgctggttggtgtactttgtgtacatgcatgggaaagggactggaaaacttactgtttgatcattagggttgtgtcgactggtatataggtaaatgtggaagaagaagataagtgctgtagcataagccgcgtaagttccagtgtcatttggcgacagaattagacgcgtgggacagtggcatggaggtgaagaaaaagaagacaaagcggagctttatttatatgagcacgtgttggcctcagacaacggtgtttatcacgataagggctatcagtcacgtgatttgggtgggtctccgataaggcgggggtgaaaggagtgtgttgtttgatctgccttgctatctgagttacaagcacactgtatctgatcttcgatcattttcagtcactatctcgacctattgatctaatcctgacagccgactgaatattgaacctttggccattggccgccccgactcgcgcaccccggacaccccaaataaaccccgacctgctacatcggtcacataacagccatggatttcctgaagtcagctatcggatctgccatcgcgaagggcggaggactcccattctccctcggtgacagagttgacatcggtgattcggtctgggcactgcacaacggtacgaaacgggtacggtggctttttggttccttcttccatgcgggacgagcttcaatggctgacgatgtcgtggaacatataggatgacggttctgcgtgcagtgtcttcgcatttgatgttaatgcgaataagtcgcgccttcctcttgcgaaaaatgcagtgcgcaagtctagaaccttgcggcatcctggtgttatcaaggttttggatacgattgaggtatacttggctcccggccctttggtatgaatatgagattatggcgcagacgcttacgacttgacagacggagcacaatctttatattgtcacggaacgagtcgtgccactcagctggccggtgaagcggaggagcttgagtgaggagacggctaagtggggtttgtatactgtggcggtacgctattcttgagagtttgatatcatagcattgctaatgaggatttctctggacagtctactctcaaattcatcaatgaggatgcttcctcagttcacggcgccgtgcgcgcatcctcggtgttcataagcgagagcggcgaatggaagctaggaggttttgaaatcctgagctctatgaaggaggacgatgcgattatatatgtgagttattctggctcaggtttatccagaaagtgcccggttgatgccaaatactgactctatgcatagacgtacggaagtagtgtacccgatgccggtcgatacacgccaccggaagttgtcaaaacaggctgggatactatcaagcgcaaccctttgacagcagttgatgcctacgggttaggcatcttgatcttcgaggttttcaatgggggtttctcaggcagcgaccaagctggcaagacgacgaacattccccccagcatgcagcaaagctataaacgtctttgcaccaccaacccgaaactacgactaagcccggggcacttcgtggaccagggaatgaagcagggtggattcttccagacaccactcattcgaatgactgaagatatcgacagcttggggctcaaaagtgacgccgaacgtgaagaatttattaagtacgtatattctcaacatgctgcatataattatttcttggctgacatatcacgacttgcagtgagcttgataatctttctggggacgactttcctgaagaattcttcaagatgaaggtgctcccagagctactgaagtccgtcgagtttggtggtggtgggcctaaagttcttgtagctaccatgaagattggagcaaagctgtcggcagaggaatttaacgccaagttgactcctgttattgtccgcttatttggcaatcccgatcgagcattgcgcgtctgcctcttggataacctgccatcaatgatcgataatcttccccagagggttgtcaacgataagatcttccctcaaatggtaagctataagattttgggtaatgcacggtttactaacatgccatagacttctggtttcaccgatgttgctccggtggttcgagaacagacagtgaaggctgttctgactatcatcaacaaactcaatgataggattgtcaatggtgaactcttgaagttcctcgcccgcactgctaatgatgagcaacctggcatccgtacaaacactacaatctgtcttggtcggattgctaagaacttaagccaaagcgtaagtgatttatcattaatgttggatcatgtcgctgacattacatatagactcgctctaaggtgctgattgcagcattcacgagagccatcagagacccctttgtccatgctcgaaatgcaggacttttggctctgtccgcgactattgatgtatttagcgaggaagattgtgctgttaggattctacctgccatttgccctgggcttttggacaaggaaaagtgagtaatgcgctcggtccctaactaatggatagccctatacttacagttgaaaagattgattcgcgaccaagcaaacaagacgtttgatttgtatgtccaacggacacggaaatatgccagcacgatgccagataccgtgatcccccccgccgcacctgcagaagtcaacaaacccgatgcgcgtgttggcacacccaatgataactcctgggccggctgggctatttcttcattcacaaacaaaatcgcagctgctcacggcgagattgaacccaccgccagcgctagcaagcctgttgattccgatactgctcgctcggcgtcggttcctcgtcctgctaaaccatcaccctcaccctcaaccccgctcgaaccacgaaaacaagcactccgtcccacagctcagtccatgaaccggtcaatgtcagatcgcccagccccggtggtccacgacgagccagaagaagaaggcgatgatgtcttcgatgcttggggtgctatggacgacgacgaaaaagacgacgatccattcactgccgctgtagcttctcccaaccccagttctcccgtcccgtcatcgacaaaagccccagcggtgccctacgatgatggcggcgaacccgattttgccggctggctggctgcgaagtcacaaaccaaagcaaaaaatcctttgccaaagggcctagccaaggccgcttctaccaatgccgttaccacacggtcgacgataagcaacgccaagtctcggaatgtggtttcacataagaagattgatactaaacccaaagatgaggagggcgatgattggggagatgcatgggagtaatcgggaaacacctcgctctccttttttgattttccatgtccaatcccgtctaatgaaagtctagcgtgtcaatatcccataacctttgcatcgaggcgtgatcgttatatttgaactcaaactcagacaaaagatgtcctaaagatgacgctcatttgctaaaattgacgttggaatgtaactagcacttaacagagccaaccaagtctcaaaacagagtgtcaaatataaaattcgacttccaccagggaaagctccttaatgaaaaatccccgttcaccaagtcttcagtatctccccagcaacccgttctcccgagctaatagccccatccatatacccaatccacctcagtgaagtctctgtcccggcaaaatggatcctcccaactggagtacgtaaataagacccatactgtgtcaaaactcccggcggcatgaaagcactggggccaccacgggaaaactcctcaagatcccacctctgaacgaggatatcggtggcattttcaacgcgcggaccaaagagattagcaaaactctgcttgacttgacgctttacctcctcctcgctcgcagtatccagcttgcgcatctcgtccgcctcgatgaaccccattattgctccgaacgagtcatccgccggcgagttgtcgtatgtcactcggattgccccgatgtcgctcacaccttctccgttgagtccctcatcccgccaccaggctgtcgggaagatcgcgatggctttgccaagtgcccccatgggcatgcgctggtttaactgatctcgtccggctggtagtaggggatcgaatatgatgtggcttgctagaggtggggacatggcgacgacaacatgtcgggctgaaatattgacctcatctgaagagactagatagcgggattttttgagctggactttgcgcacgggcgtgttcaggtagatgttttgcgagccgagtctctcggcgagaagtgttgcgagtaactgtgttccaccactcacccgactatcctgtgcacccccctccaccccaatgagacggttgatggtcccaggccctgttttatctccagcggcagctatacaccacaatgcatacagcaaagacggttctctcagttcggtcgacagtatagctgggatggcaatatcgaggagaacgcgagagtcggcagtggataatcgggaactgacgtatgtttctagagtcattgaatccagcgccgtggcattcggggtattccatggtgcttctaggtcgaccttgctcgctagggtattgatgtcgttcatgaagaatgcaagttcaataagggagcctattcccacgggaggaataccgcccaaagtatcttgataatggtgaaccgtgttgtttcgatagaaggttgaatttcccgtcgtatatgtcttataggttgggaggccgagttcggccgcgagagccaaaacgcggttttgtgttggtccaacatattcgccgcctagttcttggatattctttcctgtgaggttgaagttgagtacgcgaccaccaactcggtctcgtgcttctaatatgacgaaggatttgttggccgctgccaggtctttggcggtggagagtccggataggccaccgccgatgatggcgacgtccactttggggatgaagcattctgcaaccagtacatggcaaaggggaattgctatcacgaagaggtgcattgcactgaaggatgacctgcagtaaattatccgcataattatccgtgtatctgatcgatggactgtttgaagtattactgagctatagcggttttttatatgtagggatttcaacggatggattcgatttatatttgctcattttaccaccgactactacccaaggttacaaagtacaacagaggtaatgaagccgatttgctcggcctagaagcaatgttttgtgattagagtagcacgagcgacagaagagcgcagagcagagtatagccctgtaggtgtagctattcaaacaacataaatgccagtaaaccttccaatatctccctattacgttattgttgctggcatggatattttgtattcttcttccgaaatcacatagcgaacaacatgatagcgacacacaaaaggaacagttgatgtctggcgctatatctccgtctccgagccttcttccgaggattcgcaggattcgtcttctgatgccgatgaggaggattcattacttgttattccactcgattcttctggggtttgttcgctagacgaacatcatcatgggtcgatggggatggcgttagtatcactgttactcgtccccttgctcttagctaacgtctatattaggtctgttcgaaagcgatcaggaccttgacgtggtcatcgacttgaccgacagtctaggtatcaatattgaccactgggaacacaacctagctgcaatggttcatcaaacagacattctggcaccagcaaggtcaattgccctctacagtacccctggatataccgatttgctagccaatgtcatcgtcccgtacttccgccagcagctcgacagtgacaaccttggagaacggctgttcgctgccagtcgcgccaaggaagcagacacgggcgacctctcccaagacgccaagtaccgaactatcattctaggtgctgtcatgatccgagctggtgctcgcatcaacgaagcggatctgcagcatctacgtgacctagtgccccaaattaacttcgactcgcgccaaatactttttgaataccatgggttcagaactccaggaaaagttcagtttctggctgccctggatcactaccagcccgtgttgcacgcagcttccaggagcctaggtgaattccctttggaagactttggattcagacccttcatgctaacgtaacgaccctaatagctgcttcacgtgtggaaaaatcgaggaggatatcggtcacgagcttcagcaatgcaagatatgcaaagttgcgacgtactgcagcgaggcaagtaggatacaagctatctttctaagttgtatgttcatatatattgaagcttcataggactgtcagcgtggccagtggcacaagcaccaagtgagctgcttttccttgagccaacgccggataataaacgtctgatcgcaccttttgatggactccaagaatactggggtaaatattctgatgtttctagttctcttgtgctagggtggattattacctgcatgtctgcaatatcagggatccaacattgcttgacatatcgatcggtgaggattgatattctcttctagcgattgattcggtcaatggaagttcaaattcaatttacgctctggagtcgtcctgctagaaaatatgcgccagcacgctacaaatgtagtagatgcatgccgtggaaaggagatagacctaataatatagacgcaaaggtcaatattagttggttcgtacaatttcttgctgtcctcgtacactccactttctctcggaaatcagatatctgcataagaattatgcacatccacttatgccgattatgcagcggcaccctcactccgccgatcccgtctttccacgacatcaaagcatcacacccgatgtcttccaatgagaagaaacgcctccgagatcgtcgctcgcaacagaatctccgcgaaaagaagctgcgacatgtagcccaactcgaaaaacaggtgatacactgcgagcagcatcacagcgaccaaggcgtgcagcgccttctccaagtaatcgaagggctccgcaagcaaaacgaaactcttctcaagcgccaaaagagcttgaaatcactcgtcaactcctgggagacagaactggatgagccagctgccaccggtgattccagccatgacttgtcatctctgtataaggagctgagcaaccgagaagcccgattctcccttcaaacggatttcaacgaatcgataccccagcacgggattagcagccttctaaacgctcccctgcccgctgtgtcaacatcaccgcaaatccgatccccatctctagaacctctttccgccgaaaccacgcctccgtggaaccaaatcccaccacacactgatgacttcagcacacgcaccatgatctcctgtccgtggttcatctacccagagctgataatcccatgcccagatatccccagttcccctcttgactttctgtacggcacgaaaacaaacccgctagcagatatgatccacacggccctgcaacgccgcccagtccgtgatccggagcgactgagtactggctggctgacttaccacttctcgagatgggtcatttcccccagcccggagacttatggtcgactccctgtgttccttaggcctgtgcagggtcaaatgaccgttccgcatccgctcgttttagatttcttgccgtggccaaggataaggctgaacctaattcggcgttggcatctgtatagtaaggatcgggatgacctgttcgggttcatggcttgttgtgttaagattcgatggccttggaatgagacgattcttgaacggaatgaacagaacgagttgtgtattaaaaaggcgttttatgagatgttcatgactgaaagtgggtgggggcttacgccggactttattagacggtatcctgatcttgtggaggggatggatatcaatcaaattgtgattgaacttttctaaggaatgaccctgttcatgtacagaaattcatgttctattatgctctattctattaattgtgtataggcaacttctatatgtgggtcgttaaacatcatcccgatcatgggaacagacaaggccgatgtggagcgaatagtatgcccttgatagtagcagctcaatccttttcaatctttaccatcgagatcaataggccacttctcccgaatcaccttgccatacttgatgaagacaatagggactgggatgaatgccaatgccaggaacccaagcaacgagttcccccacccaagacccagattaccgaacatcttcggcccagcaagcgggagcagagctccaaccagggagcgagtcgccgtcaaagtggcattggcggacgctgcatatttgggatagcaatcgatgatatatgtctggataggcatatacacgcccatcgtgccgactccgaaggggaacatgccaatgataggcacgatccaaaatacgtgcttgtcggctgtccagccgtaccagaagaagctgattggaaggatgcaggcgaagataatcatcattgggagacgcatctcgggttcgaacttgccgccgttctttgctgtagctgacatgaccatgcggtcgtttgtgaaggcgataattgcgaggccaccgataaaaccgaagccaatgccgagatatgcaagtcccgataggccaacggagaacccgtatttctgagtgaagacgctggggatggtagtgaagaagaggtagagaaggccgtaaacgaaggactagagatgaaatgttagtaattcgcatttcgtctatcacgaccgaacttggactcaccatataaagacacagaaggaacacaattggcgacttgacaaacagcaaaaccggcctcttgaaactctgcaccatggtctgtcccaaagtaacgggctccttatttgtgtcataagcactccgcaaatccattcggcccgtctccttcacgagtttctcggtcttccagcggataagaacttcggcatatgtctctttgttcagaaactcaacccccaatgacacgataccacccacaataagcaatagccaaaacacccagcgccagccagcttcctgtccgaggaatccacccgcgataggcccgaccacaggtccaatcagtggtcccatagcccagacggcggttgccatgccgcgttgctcccgggggaacatatctgcgatcacacccgcaccgagtgttagacaacccgagcctccgattccggcgaatagacggcagacgatgagggtctcgatgctgtttgctcgtgcgcagccgatttgccagaccacaaaaaaccaatttgcagcactgaggacgacgcggcggccgtagacttcgctcataggggcgagtagaaggggaccgaactagttccgacatgttaagacgggttggattgcataacttatagggtgggatgggctcactgcatatccgaggatatagatgctgacactaaaagacaagattgtctcatttgtttctccgaactccgctgccacgtatgagatggcgggtgagaacatgctcgaggccagcggagagatcagagtcatggcactgatcagggcgagcaaggtccattttttgttggccgggaagttttgggggttattaaggtcatcttgtccgtcccagcctactattccgcagctgaggtctgtttctgggaatatttctgtggttggtgctgatgtttcggtggtttgcctcgttggctgtttttcgaggtcatgtgttaggtttctgacgctgtctccttcgttcagggttggttggtttgaactggactctttttgaagagtatgcatcatgaatcacaagtgtctgtggaataatgtacaagagaggacgtgcttggcatgtgagagtatagagcagtatagtggaaaaagggaagaaccgatcaggtataaaagcaaaagccccaagacgatagatcaggctattatcagcgcgccagttttatccgatatatccaccgagatatacttcattgctgccttatattgagtcataaatgccattatgcttataaaagggattcataaatcgacaagcatcgcgcaatgcaacgagtatggacaatgtgatggcttagcgatgattcagtgctccacttctattgttcattgaccaataaacgctcttcagaatagccaatctccaggcgctgaatcattgtttggtgcctagtggggccactctcctctcgcatagaacctcacgtttatttttatcttcttgatcttttaatgcgcataattcattcggctcaggaggttgataacttgcgatttaattggtaaaatacaaggatttgatagcatgtgtctcatctcggacccctgtttgaaatagcctttggaacacagcctccatatcatgttcattgttccttctcggcgtcttcgaacacacttcatatcattttcacggcggaatcaagcacttctttgcaggacaagtaggcaccccacaataaaaggtagccatgtgttgccatactcttgtgcactgtcgggcttccatcgttcatcacatcatcattcaataggcatcggatccatacactccaggtagtccaacacatcgaggtacacttcttcaaggtaagctttggtaacatcctgggcgaagttgtgcatgttcttcaaccgttcatatctcagattgacaaaggctgttcccacatcactctcaacttccgccagcaagatcagcagcgggacaaatggcggaatccccatcttcatattcaaagtgtgggtgtaatactccatcagacggtgaacaaaccaccgggcactagagtaatcacatcgccggcaccgaatgagattgaacagaccgcttgagatatcctcatagtcctgtgcgggactgcgggtataaggcccaagaatcttctcggcccccatcatgaactcgtctgccagttcggctcggggctgttctttcgcaatcatgcatacaaggatcggattcatgttccacgctagccagttgcggacctcgatcgacatctgttgccatctcctagcattgggcgagtccctgtaagggcgaacgatgccagaatcaatgagccgatgaagtctgtgcactttcagaatgtggtagatgtcattgcgccaggtgaggtagtcggaagggtgtttcagaggacagggaaattggtacagcgtaaagcaagcgatttctggcagctcaaatgcctggtcggttggtccagtctgtttctcaaccagaagtagagtcgaccaatcgcgagtgtgctccgtcgacatcttggcgtatggttgtaaagatctttgtcgaccgggtgccccgttgttgtaaagtgagaggagaccccgtctggaactatacacaaacccaccatgttagctcatatttttttttcgaaatccttacaataaagactgaaggcttactgtattgatcaattgagtaaaatatctgactatgccacgggggcgtgtgttggtgatctgcacacctctcgctgtctttcagtcgatagccgagaatcagaggataacagatttcccacaattgagacgactaaggagccctgtagaccgagagaatctttcaaatgctgagatactgacagttgtatctgtctgtatgtttattaaaaggaattgagtcgaacagaagagaagtgaagggaggagaggatgaaagtcatgaagggtctgagtatgggacccagaatatactctcacttacgagcaatcccacatgagacatagtttacgcgggtacctccgagggcactacgtacatttaatccaagaataaatctactgtcactagcagtggacttgaagcagtattttcaaacgaagcagcatttcagccatgtatggccgatgagcatgtctataagtgaattgtatagttcctcggcctcaaccaggaccaccaacaccctgctctttcggtgtgaatatagttgtgttgatagtcctcttaatataagttctttcaatcttgaaagcatatgtattccgacaggaagtttgcatatgtccacgcagaaggttgttggcaatcgataggccttatcgttatcgtccccgccaatctcctaaccttgcccggtggaatgtcatggacttcttcactcccaagatcagcctttctctcgtatgtaccccttcatcagggtctcagtataccctttgtcgctgtgagtcattctccgacatccaggtaggacataacgtctcccaaatataattattgtacgctgacagaaccccatttacagtattcttgctgccttccaccgcctctcaggtcctcgttatcttatcacagaatgggaattcactgtagcccttcctaggccactatattgttgctacccttggatattccccggccgatcataaccgccttctcaaaatggaccaagaggaggctccaccacccccgtactcggccgtcgacccattactcgcacctgcgagcagtcggaacaacagctcttctcaggccccaatagttcctggtgcgattgtctccccaacgcaggatgccagtagctctcgtgtcccaatacagccgacggtcgtgccgacgcatttcagatccgccgctgcgtactttgaggaacggcttccctcggtcttggacgagagccgggatcttctgcaacatcatatgaccatctacccccggagccaggctaaggattttccacgacggccacggtgctgggcctctcgattagatgaggttacccagcaggactgggatacattcttaaagtatctatttccgccgcaattggggctcgctgcatcctctcagcatctcccacgccaattgcgagcggagattagacgagaccgcaaagatcgcccacaggagactgatgagcaacggaaagctcgaatcgcggccgttgtcgccgaatggaacgaatgctttttcgagctccgcgctacccagattgtctttgtctacgtaggcgaacctgattctgcaccatcgtccgctttatgtccccgatgctatccagcggcaacgggttcgatagatggccagccgattcgaaattcaaatgctccgtcacccgtgcctgggcagcacgttccttctccgactccttggtcgatgcctccctctatgttccataacccccaagtatatgtgcccccatctccatatggagtatatggtgttcctccataccctccccccatatctcctaaccaaccacctcaatactatacccacccaccacaaggcccatggcaatggaacaattggaactatacgcagcagcaaccgcagtaccccaataatggcacccccaaggctggatccggtgggtggatttcacagatcgcatcacaagcccagaaatatggagagcggttcagcgaacaggcgctacaatatggacggcaggtcgaggagcaggctattgcacatggccgctggattgaggaacaggcaaggcttcatagtcggaaagcactaatggctggacctccatacggtggtgggtactatcctcggccggcctgggataactcgcctcgtcccatagccaacattccgttgacacccattcaaagccctagccctgtgacaagtcctaatccgacgggtcggcctgagacaatcgatcagattgatagcaataagcctaagccctctacagaacaacttagggtagagccacccgcgaccgaacatactagacgagtatcggtgagctccgtgtcatctgagtcctcgttcagctcaattgactccatctcgacaacatcggacctgggcgcttcagaccttgccacagtgcgcacccaattggagcttctagacgatcgtcatgatcgggtattatatgacgccgccgtggacctccgccggcaactgtcggtcctgcaagagtcccgccgagaagccaagttctccggtaataactggcgagcaggtttcagccagagccaacaaaacagccaacaatccggcgacgccgactggggtcgctgggactcacctgagcagcagcaacgcaactcggtcgatagacgcgccatgaaagaagaaatgcgtgccactaaaaaagcattccgggacacgctgcgccgagcacgagacgagcagcgtgaacgcaaacgcactcgacgccgccaggtccgacaagctcgcgctaatgacagcgacacggcgaatcatatgccttcccagccgctagatcagcagcttgggacgttgcggctggaagattcgcggcaatttaacccgcctatgcctccacgtccagtcaccacacaagcacagcctagtccggtttctacaccgaatagctcgaatgtcggatttggatttgcttccaattccctctcccctgctatctcgcggctaagtatgcaggagtcggcacctactggagactctggcgcctttgtgaagaaagggaagccgggtgatacgtcaagtcggctaaaggatatgctcttaccgcgcaaggcgagaaagcaacagccgaaggacgaggatacgggaagtaaatgatttgcatatgtcttctcttctctttggttttatcttatttggttctattttcagcgtggtgtccaatgttttcttgggaggacggcaaaaatgaatttgctctgctcaatgcatagttcagatctcgaccacatcgaagtcgacgaagttacgattcacattgatacagtacatttgcgaaaactttatatatcgaaatcaaactttttcaaaaagatctcttatacatacaaagagcaataacccatgcccatttgagtctatcttcacatatcctctaagccttcgactcattcttctcaactaaatcaccaaccccaagtcctctcccaaccttaacccgaatcatcttctccgcatccttcttcccaagctccccaacctcttcgccctcatcctcgttcccttcctccccattcttttccttattattctccgcatcccgcttttcaatcgccttccaatcaagccacaagttctgaagattcaagcgcatagcatacgcatcctcgccgtcggcatagtacccgtcctcgaccttctcgacctcaaagccaagcgtatcgcggtacagtcgcagcgcagcaatgttcgacatgcgcacgtgcagcgagacgaaatgggcgcggtgagattcagccattgcgcgttctgcaagaaagaatggaattagaaaaccggactgtaattatatgcgaatatgcagcgtttgcaggtcgtttcaaatacaaatgcaaatgcaaatgaaaatgcaaatgcaaaatgtaaaatattagatataaaatcaagaatatcactcacgactcatccgcatcaacctctccgcaatccccaaccgtctatgcgtgcgcataacactcagactggtaatatgaccatgctgattcccgtccgtaggctcctcctccatcttcgcgagcacgtatccaacgaccttgggatactcgcctgagatattgccggccatgccgacgcctttggggccaggcttgtgtcccccgcgtggacgcacgaccgcgacgaagcttagctgcggccaggtcagggcatggtacaggtagtattttaggaagtagttctcgggtaggttcgttatgttgcaggtttggattgaggggaggaggtcgatgtaggagggatagctgctgagagggacgatgtcgaccattttggcggttttgtgcgcgcaggcgagggtttgtggtggtgagggggtggttttgggtgagggttgatggtggagttggtttgcggtgcggtggggggtggtcatgtgatgtcggggagggagctggggatgtagattgtatgtaggttgtgatggggagggttggattggctattttgctatggtttatatgttggttttggttttggtcgtctggaaatattttattttgatttgttcagttcgagtgaactgcgcatgtccgcttgttgaccatgatgtttatgaatagatcgaataaactacaacattgtacacaaatatgtactatatcaaaatcatatgcagtacaatatatgtacggccaaaaaaagaagaaagaaacctagcgccgacgaccgatccggtcatgcacccaaagtagtcatagatatcgtggaaatcagaacgcagacatcaccacctgcactcccactgccaccagaagcaccgtcgaaataccagcgatagagacctcgcgcagcgcgccagatgtcttgccacagcatttacggttgtaagtgacattgttcatctgggcagcgacctcgaagaccgagccgttgaaattgccgtaattataataatcgaccagaaggaagttgggaggactgccccaggttgctgttcagagttagcaacgcacattaagaatcaaacacatgtcaacttacagttacattccctggccattgcgcctagactgccactaccgttcacagcattggtctcgtcaatcgaagcagtattgggaatcaacaagctcagagagccgaggttcagctgcaggttcaaattgtggttggccatgtacatgcggttcttagcggctgtcacagacagaccgggtgggcgttgctgcgtgcaggggaaggtggggtcagtaggcgaaaatggcgtctcccacacctgcgagaactcatccatcagccatgggtacgcggtctggttggcttggtagtccatgaagaagactgcacgcttctgcctgaggatcatctccgaaagtgtgggccagtcgtccaggcccattgggaccttggtgggggtgtatatgaggtccttcagtccggagttgtagattggggtggtgaagttagcgggcgagacatagtcgtaattgccgatgatgaaggtcaccacgtcgtatgggttcttccgcatccacgtgttgacctcgactaggtatgcttccagtgtgccgacattgagcaattggcaggtcgtgtggcacaagtacattgtgccgttctcgtagtgcgtttggaattgcactaatccacaggttaataatcgcttacttctcaaaaggcaatgcaccgccgcttcacttacgcagccgaattccatcattcaattgtgttgtcacatccagtacctggttggcggcgacgctgttcttgcgcacgaacggactgttgtgtgctgcgaccatggtaatgttggagtacttcctggcacagaactcggggtagtcgttgcaaggtcgggtgttaacgacaggcgcttgggtagatgtactggtcctagtcgcagttgcgttcatgctattgttcccgatcaccgtcgttcctccgcctccgccgcccactagcaaagtcaaggagtcggaagtcatagtgactgcctgcgtctggttggaggcggtcatggtgccattgtgttgagtggtcgatgcaatgaccgacttgtcgccatcacccagtgtgattgttgtagtgaggtcttggtaggtaccggagggaatggcgatgggagtcgtgactgacacaatggtgggttcatcggtggtggtcttcccggattccgtagatgatttggtagatttggtggattcggtagattcggtcgattctgtagattcggcctgggccgcggcaacggcgaggaagccgaggacaatagtaggccacctcatcctatgtgatatgaagactctacgtctccaagataggaggagaaaatgacggggaaatactccaacttacctaatcggcacgtggaggctttgacgatatgacgttgaccaccaataaaggagaatgatgggccaattgtatttttatatttttctatcactttaggggggcgaagtggatgatttttagcctgggtctcgtgccgattgctgcctgttataaatttagtccttcttatacttttgtctcacatatagcggctgcactattattgtatattgctctatattattctactaaatctgcttattggctgtggtattgccctttccttgcttttcagctatctccatacctctatccatgccttgatgaactaatatagtccgaatgatcgacagcgtaggccaggggccaacaccgctagtgtccagccaccgacgatctcgtggcagacgcgacgatccgttgaaatttcttaaattttgaaactaatagaccgaataggcccaggaaaccctaggaaccctgggaaacccaagaaatcccttttaaaagctaaaaacaataaaacaatccaatcccatttgcctggaggcgatcgggagatatttcatggcctaacgtcatccccggagaccttaggcaaccctaattttcctcatctcctggggattttgggactttctctccttttcactcatttatcacatttctatcatgcattggacggaaaatggcaagcgaaagcttcctttttttaagtccactaccccaattgaccgccagcgaaagaccaccgttcgttggcaccgcctgttacggtcgctgttgtacttgatcgcttggatctttatgctactggtagtcattggcaacatctctaacaggcccgtcctacgcaatacctacttcctctacctcgatctttccaatattattcccgtctctattcccaatgccgtccttatcaactctatcgcccagactatcgggctgcatgacttctaccaggtcggcctatggaacttctgcgaaggatacgatgaccagggcatcacccattgctccaagccggagactctctatgcctttaacccggttgagattatcctgaacgagctgctggccggtgcgacgggtacgttctacaatatccccgcacccaacgactcccctggaatgcgaagactaacagctacacccagtcgctctcccatccgacatcgaaagcccattaaaactagcccgcactgcctcccactggatgttcggaatcctcctatccgcagcagtcctcaacttcgtcatgatcttcctcgccccgcttgccgtgtcctcccgacacccacggagcatcaaagcctgggccgcagaatacaacaacggccacccgcccgcgggcaagccaccccaccgccgatgcaccttcatctggttccgtgcgctgcccatgctgattctgacatttttcaccgcgctcgtgacaatcgtcgggtcagccgtcgcgaccgttatgttcgagatcttcgccaatgtcttcgcaaccgccgatccgagcatcaacatccgggcgcatgtcggtacccagatgatggtctttatgtggatcgcttcgggtttcagtttgttcgctttcatccttcagcttggctcttgctgcgcggcttgctgccgtggcggcaaggcgcgcaagcaactcaagtcggagggtgtcaactggcgcgagaagggttctctttcccccgttgcggctgaatctcgcggtgtctcgtcctgccgagatgctgctggtctccccgaggatggttccgggtctagtggtcatgcgttttcgaatgaacatgagcggaagctgatcaatgggcatgctccgacccagcatcattcttcgactgaacctcatgcaatctctacctgatctcgatcgccatttccctcaattttagtcatatccttaccctcctctccggattcattctcctttctaccattctcatcatctttggggtgttttttttttgccaatacccaccaacactgtgccatagtgctcccatttctgggcatttaccatattttatctaccattatctacttaggtacgattttacgattcgactgcgaagaactagaggctcgacatttcttgtttattacaatatccatctcacgaaacttgtttattggatgtcgattgagtagaaatatataaattctgctcttaatttttccactgcttcttttcccttccccgcattggctacgtcacagagccgtcgtaagctccaagtctttgccacgatcccaagtccctctgttgagttctgattcgttcattcgcatccaaccgattacctcccccacttatagataggcgtatctccactatagcttcctcatacacattatattacaacctatcacacagatcagccataaccgaagcgcacatcaaacacctaatccgtactacgtattcgcaatcgacccgaccaattgatcaaccatgccttggcaaccaaggataacccaaaatcccgaaaggaccccggggaccctgatcgggtcgatcgattcgatcgacagtagagcaatcaccacaccaaaacggaacaagccctaggtgaaaaacaccccgaggcattagtcgagaaggtacaaagaccttcaagttagtatctatgtgctgaatctcatattatacggagtccaatggaattctgcgctcagggtcgggtcagggtcgggagtgccgtcacccgcatccccgataataccatattgatgctgctattcctggagaactgcatatctgcgcattgtctgttatcagcactagattcatacaacagaatctgttcgctaattgttctatcgttcgaggcgcaaaactagtccagtggagaggcggcacacatccactctatctctggcccgtctgggctattgctgatccttctacatacgtatctcgtaccaatactccgtggacttggcatcgatggtggatttgccacgataggtggtgcgcaatcgaaaaatcgtggctgtaggttccatggtcggatacctggtagttcatcacccaggcaaaaccttccaaggctgcatatatgagaatgggtattcatggatgtaattctctgtctttcaatttcccgaggtcaacacaatctgacgaatacaaaataatacacagtgacgtggatcttgaccacgtagttttcactctgccactgtaaggctcttgtggtgattggtctcgaagacacaactgctgaggagcgggtaaagccttgggggtaagcttgccctgcccgtgaaagacggcaagccctacgtatctagactgggcatgcggggccccttctgattggggtgaacccacaaaaagcgccacgatgagaagtggagactccactcagtatgcaacgtccaacatgcatcctgatatgcctaactcattcaatcgctttgctggttattagttgagagcagggaatatatcacgctgcagaagctggcttctcgatgaatttcgccgcaaggctgtgcccggcgctgtactgtgaggccgcaggggcagaagacgcaggaacttgggggactagctggacgagtctggccgctgtggtcgaacttgaggttgccatgataatatggttctcggcataagcgagctgaacgttcaagaccgttgtatggttcaaatggatctactatatagttactttctatccttatatcccaaccacatccggatcccggcaaggtcgcccgtctcgggagccgggtccagacctaacttagaggctctgttggaagcgggggccaatctatacgccctagactatctaaagtagctggtatatgtgtcacctttgtgatacaatcgcctagaaaggaataacccccgaatagcctattactacaaaaacagacaccggagtgcagagaagtctagcagcgcgccaaggcctggcgcgccgagctgcaacgtgcgtgacacagacctcgtcaataccgttatcgaggatatcgccacgggcgccgtatacatagatgacctaggtagtcgcggcagccgcaatccaggggtagagagatatactaccgctatggtgtgaggatgcagtcgattgaattggagaattgttctctattatcccttaggcctaactagcgtgatctttctacagcagctactatctatctgcgcatcgaataccatacgctgtgagattacagacatcatagattgattgatagatactcggtatcgggagaaacaggtgggatattagggaagatgcaatcacattgcgcaacaaatgccaaagcacacagacgcagagaatagagggggaaatcaatttcaaaggtcaagtatagattctagacacaaatagataaaaacgacatgcacagaagtgatcaaacccatgctcaccacccgaagatgtggacaataaaatagctccagtcaatgagaaaggaagatcaaggaaataaacagggtatcgatatggaataaaaataaagccaggtgagaccgaaataagcacgcaagccccagagaaaaatcacaaaatcaagatgagaaaagaagagaactactcgtactgacatggatgcatgaagtaatgacaacgcaagaaaaatcgaggaaggaaaaaaaaaaaaatcatgagcccgttctcgttcactcctagtacgccgactgatcggtccccgtattgatacgccgtgtatgcaaaggtcaagctcgaatgacccaataagaaaggcaaaaacgagccatctagcccatctccatgccgtactcgtcctcctccttgaagctcatagcagcatggccagcactgttccagtactgcggctgaccagcgccgttggcactgctagtaccgctgtggaacgaaggactcaggctcggaggtgtcaggccggacatgtcgccgccctgcacggcatcgccggcaatgttagtgtgcttgggtacgcgtaaaccgctacccggtccgcgagtgtagctgaaggaagttgggtcattcctctccagtgcatcgaggatctcgctgcgcatgcgcttctcctcttcggtttgctcgaagggccaagttccacccaggctgccgatcagctcggcgagttccgcttcttgctggtatttgacatgtagggcccacatcagatcgcgagtccagctgacggcaccgttgagtatgtcacccttgttaggacctttctccttttcttcgattgggagacccattgtgatgttacccgccgtcgcacggcgaccgttgcctccagcgaggagagacgtggcggcacttccacctgcaccggccatggaaagagcggtgttgttcacaagttgcttccggaccttgtcgtcttctagtctgtgctgaggaaccaggtgggagagatcctgaatgcgttcgttgatattgtcacgtcggcggcgttctaccaggttatgcgaggcgcggcgacgtcggcgcttggcttcttgtgattcgagatctcccccgccaccagggagatgcgcgtcaaccttggcgggcagtgaggcgtgcttcccagacttgaggatctcggaaatgccggtgtggtgcgattggtggggaggagatgagataggagaggattcgacgtaagactgtgcgctgccgggagttccatcccactggttggatagggttttctggtgacgagcctgcaggccggtccggataggctgggacgggaagctgccagactcaggggtacccaatgtcaaggaacccagtgcgggtgtctttggggtcatggggctgcggccgtcagatgaggtacggtccatgccttgcaagctctggcgcttggtgccgaggtagttctggtcgaaagagctggcatggatgtggggattttgctggttcatgcgatactgctcatagttgaagctgttttggacgaacgggctggccatgggagcattatctggggtgttggagtacatatgcgacatctgactttggtgactcatcgcgataccaccagcagactggtcttgaagataattcacattgtcgcgctgatgaccgttttgaccgctgatctcgagatccaacaactcgtctgtatcgatgccggagtttccgaagttaaagctggatgacatgttctgttgcgagccgtaggagtagggcatgaagccattctgctgctgcatgttcaagtcggacggatcgatcgcatcgttggggaattggttacccatcgagtaaccggagtgtgacatgatgaaaggggtgtagtcgtcggattcgtgtttgatgaagagactcgcttcagccatagcctggtgaaacaatatgggggtttgaaaatggggcggagatcggcgaggggctaagggaggagtcgtggtgccgatcctactgactctccgcgacagttgtcaaaagttaggcgatccgagatgcccgataatgaagaatattggatgaggtggggatgtgagaatgtcacgatctgtgtgcatggaaaagatgttagtcaagactcgaccccgcccgtaggcgacttgaagatgtcgtggcctccgtgcgcaaggcaacaggcaacccaacaaaatgcaaaatagaaagtgaaaaaaggaatgtgaataattacccttgaaacaatgaggattggaagaatgaagtccggggagactgtgagacgtgccaataagccgggggaatttcctcggtcttaaacccgggatgggtgcagatctcgaccacaaaggtgtcttgaagaaatcgcaaggcacaaggtgtaaggtgtaaagtgatagtatcttggagaagttctatagaactttgtaagtgatgaaagagaaagaaataaagctgagtagtgcgcaaatgcgaggaatgaaagagaaccggggaccaggaagaagaaaagagatcaaaagaccagagacgagcagggaatgaaccaagctcaaatcaggtactcccagctgaactcggttgatcccagttgatcccagttggagtatttgatcccagttatcctttgcagatgtaaaaagtctggagaagaaacaagcggtgggaaggcggtgagatggcgatctggggaatttttttgtcgagaacgttggcctcggtatcatatagttcgtagttcatacttcacccgaagttgtatattggccacattggatttgagtatctcttgcgccttgaccccccgggtttgctcaggatttgatgcccacgctcggattgcaatcggaatacgagttgatgcaagcgcttacttcttaataacaaaagaaaaggacatgcttgggcttgggtttgaggctgatgaaatgtaggacctaccaagtgaagaagcgtatgcgaagtcggtgtatgtaagtatacttaggtagactgaggtataaacctgtgttgaggttagtgaaagatcaagagtatacatcccaagacatctcaataagcatgcaggtccagacatgtaagacatatcagcagagccccgttcacacgtgggcacctggcgacaagacatatatcacagatgcaggaacgaaggggatatgtgatatatgagaaggaacttgacacgtaccttgatctgtatgctaaactaggagttcacggggcataaagtcttcacaaatcagaagttcgagagcagaagtgcagtgacaactcagaggaaagctcttgctggtttcgcagacggacaccgaggggatggagactttatgaactcaagcggcgctctcctgcatctctcatttgatatattacagcatcggtcatgcagcccgtcgatcggtgggaatcgatgagattcacctacgccatcggacatggatttttatttttattttagaattaagttgactactaccatctggatcagaagggaaaaagggcgtgtgtgagtgtaaatggatgtgagtggatattgggtgaaggaggggtggcaacggtaaacccccgagcctcttttgtgtttttcttcttcgtactatacatagataataataataataataaagggaaatactaaaggaaaaaaacattatcatattcacaacccaaaataaaaaacatacttgggcaaaggggggaagggtgatacggccggatcaagtaaaacggctatcccatgatacacattggtatatttgtcacctgttactgcaatcatgactcacggatgtcttgaatagagcaagcaggaatgtatcagatgagattttggggttacaagcataccgaaacctatcttctcagaaacccttatctatcattcagagtgggagttttgcagcgtatattcaagattcccgaacgaggccatgtggatatggttgagctacattaacaatgcagagtactagcactcaagatgccggagatggtatagatcggctagcaaccgtaaatgactacgagtcgcaaatatcatccggagaacctaacatgcataatcccattaccttggcaataccagagatagacaagattggacaagatcctagtgtatatgcgaaagaaaagcataaaagaggaaagaggaaagagaaaaagaacaaagaataacacagaccacatccataagcactagtatcaactctgcaagagcatctgtgcggtctactcttcatgtgggatgtcgtgcagaggagtctggagtgacgatcatatccgcactgtgatcgtcaagggagcttggaccttcatcttcctccgctctgactacgcacttagccttgagtctcttctttggtttatttttgttctacgtaggaggcggacttgtggttgttgatctaggatacagcggcaaagggaataatgttatagttcaatatttggaactctacagaatgttcaaggcagtcagtaacttcggacttcggacttaactgtccggcctttatcggaagcaaaaagtagaatggtagaatacgcagaaagacaattggaggggttggaatgtgtctaagaccctccaccaatagtgaatcaaagcaatacacctcgctttggtatgactgtgctaagccacatcgccaaactttcccctctttgagagccactctagtttaggggatcatagtatgctgagatcgacggatggggactgatctccgagatttgagtggaaatggatctgacgtcccgtcccgtcaaggttcagctatacactagtaatccacggtcgacgcaagggagaggagttgtatccaacgatctactttggtggtattcaatacacgatgttgagactatctatctcttactcaaagtacccgtgcacaggaccctgacatgacgacatcgtacgtggttaaggtcgcactccattccggggtcacggataaactgcctcgtgtgcgtcgaggacatcctacagagtatgtctgaaaaagcaagagaaaacagggaaactgaaaaagccaaagcagaacccaaatttggagaaacaatgaggctagtgataatgttacccacggtgcagtccggatgcatattagtgcccttatggttatcggataattcccctacgtggtacacgggtagctacataaatacagtcaacagggaaaggttatataatgggtatgcaacatcatctgtctggagttcttccgatacgactagcggcaactatagccgttataccgttattgatagatgcttctgcagggctgtccaatacaacaactttgccgccactctactgttacagttacggccgatcgctacagggtgcgcaccagccatgaaggatcgacagtgggacggcaactaatgattagaagttgcagaaagagcgggggcactatcaataatggtcatgagtctagatcgggtatagtaaagaatagactattattatagtgcaaattaatattatagtaagtcagtcatatggcaatcacattcaaagcatgtcgatttgtttatgcaacaaaaacctctaggggagtacagactatagttctacatgtctttaggggatttaaccctacagtaggtatagcgcaaaggaaagaaatatggataattatacaatgttataataacctaaaaacgactaagaatagatagtaatctatattcaataatacacaaagtcgctgtagctgggttatatacttgctacatattggatcacgctataccccattgggaactagcctcctttccccgacttcattgcagaactgggaactgccactatacaactatacctctacacgccacataggcaacatttcaccctcttggtaagtgacatgtatttctttcattcccctggttataatcctatggggggataatcctggtcaataaccccacagggctcggtccgagagctttgtacccaaacactggaaaccatcatcatctgacagtttcagcacttaacgccgatcgggttggtcacatcggtagcttcacgccatctcgtcattttgcttggttcccctcgtctttataccctcctttctcgatagcgctgcgcttccttgtccaatcagcactccctacgctgtgttcgcttcccatcccttctcggattgtgcccgcaaggttcaagctttccacctatcttccgtttggttggcttatctcgccacatttttgaacggcgtaccctcgattgcgatacacttgcgccgcgccagaggaatcccaagctaccccggtagccatcgccagctccgcagagatagctgcagatcccgttgggctgacgccttatcactgtgcaatagacagacttttcttggtcgcggagattgtccataaagtttatctgccagcgtgctattcaaagcctttgatctttcgatcttgaccggcatatctccgagtcggagaactttcctggaaagtaggcccgttcgaacccagtcacggcgtgtcccagctcatcagaagccggatccacattcgacacagtcgtcatctgcttctctgttggcttgagcaagtccccacctctagccaatccttacggatcatccaccacccgcgcagatcatctgcactccatctcgcatagtccctgcagagtgttctcttgtcttgacttcctagactacgggccttttctgcagacgcagtagtgcacgtacctctactcgttttatttgggatctaaaactcgactaaaatctgacttaaattagtctcaaacatggcgaataactcgttccgagactctgtcaactcactgggatggtcgcgtagagacccggatctccccgtgcaaactggcgcgtcatcgaacaccccattcttatctcgtctacagtcttacaaccccttcggcgaagggggttatgttcaactgcccactcacaatgaaggtcctggggccccgttgccggcaccaactcgacgggaagaagaagagggattctttgcttgtaagtattttattgtctgtcttgtgatcccccgcttcccagatcttcccgtaccccgttgcataaggtccaggtgatgagactgcagttcctgcgccggcaggattcattaccaccatttgcaagtcgataaatgaagagagaaaatcactaacatggactgtgtatagtgagtcggtgggatcgcatgctcatctttggtgcatgtaatttgggcgcagccatctgtttcatgatctgcttcttcttgttccctgtcttgtcactcaagccccgcaaattcgcggtcttgtaagttgcctccgcgatggtccgcattaatgtgggctatgttttccggctttctatggcccttccagctttatttccttttttccccggctatctcatgctctcggacgaccgagcaaatcccgagctaggatagaccaggtcatcggtcaattttggttagggccatgtgcgcctttgtacttcacactggaagctgattggccttgattgacctatatctgcgcctcatgccaagaacattcgtctctggtcttggatatctcttgctaacaggtttctttattagatggtccgtcggctcagtcttgtttttgctatcatgggcggttctcatgggaccgtggacttacgctaagcatttggtctcggggacacggttgccattcacagcggcctattttggatcgatcgccctcacgctctacttcgctatcggggtaagtaaaatcgatttctttatctttcttttttcgttttcgttttcggatttggattttgtgtttgatctttacgctttacctcgttgtgcgccgacgatccttcctctcctcatgatactcccctctgcatttgcttgtttgtcgcacactcgctctccctctctctatcctagtccgtcttgtcgcactgcacaaccgggaaaaggggaattttgcaaccttcacacccatcgcgcagtacaacctgaatccacggcttgtcatgtctgttgttggccgcagctactttggatccttcgaatttatcacactctgcgctcggccgtcctctctactctaactcttgcgtctgtgccacgtcccaccacggtgcgggacttggatgtcctttcccttacttcaccttgtccaacacctaccggtgtcacagagcgcggagtccagagcatcgagatcaacctgtgtctcaccgtccctggctatcaagtcatcttgttctatccgcatatcacaactacacaccatccacttgccgcattcggcaaaacatcctcttctggaaactcatgctgacttcttcttttcggtgcattctagcgtcagaacctcttcctcactctgatcttctcgatctttcagctcgcggccctcgtctggtacctcgtcagctatttccccatgggcagtaccggcctgcagtacgtgggtcgtttcggagcatcgcgtgtcaccgcttgggtcagtggttaatttgttcacttgctcgtatctgatatcctgctctttgtcggctctcacatatatcgaacggtatactcgttgttgcttcgataacgggcgtggtttgggctatttgttgtgtatatgtagctagccagaactacagtgtttggcactttgatttcattttttccctccaaatacttacctttgcgtgtggacttcgtctcttggtagcacagcactgaatattaatatcagaaaatgggaccttgtaggttactagtgcatatatcggacttcaggctacgcttgatgggtttccctttccgctttagtgttcagctcttgccgctttttgacctctcaagtgaactgggggacgttcctaatcacactcaggcattacctagtatcagagataaactacctgagacctaatcttagaagcgaagtaaatatgaatagtaaaaatccatttgatatcaaagctagcttaacgaataagaatgaggacacgcaggcataagatctacaggtaatgcaagcagcaccgtaaaatgcaatccagcaaagtcatagtaatagtcatagtcagcacgaaagaaatcaagccccaggttcaacgaccactctgtttcatcttctcagtcattcacattgaaaagtccccttcaatacttcccccgactcatgaccaacccaacaacaccatcaacaaccttaacaccctcgacctccgcctcaaaaatccccgtctcaccaccagacccgacctcaacccaccgccgcagtaaatcattactctccttcggcttaacatctggcgccaccgtgccgaccgtgatatgcggaatagaattcgcacacggccattcagccgcaccggtctctgtctcaacgccctcggcaggcaggatgcgcgcgacaaaggccatgatgcggttgtcccagacgagacgctcgatgcgcacacgcgcggagcccagggctggcgggtactgggctggattttggacggggtttttggtctgggtgtcgatgtagcagtttgctagctggtcccagatctctgggttgtctttcttcgaggcgcggtggatgagggttacgtggaaggttggttggagacggcgggagtttacgagttgattgtagagacgggctgtttcgggggctgttgttggccggaagagggagtgcaggattgaggttatttcggtggttgggagggagatgttgaagtattcgatctttttggagagggcttctggtgagaagggggagtctgttggttcgggaaggagggggccgggttcttgactcttggtctttttctttggcttctgtggagcgccgtagctgtagctgagatcctttgtcacggtatagtcgtttagggaggcgtcgatggcttcgtccagctctgctgccgttggcatggttggaactaggcgggggtaggcggcgtgtagggctctgacgactgtttcgaggttctcgcgagaggaggcgcacacgtcgaggtcaatgacgtgatcgaagacctggtctggcaagcgggtggtgtcgacgccttcgaagcggccgaggaatccctccatgattccgacggtctcttctcgggcgttggtgccagcccggatggattggtgattgtcgccacgctctagcacacgctttcgagtgacttctcgaatggcgggaagcatgtctgccttgggctcgtgaacccaatgcagagcgacgaactgcgcatccggaagcacggggtagatatcgtccatgagctgcttccgctcgcgccgttgatggttgttgcgatcggcgattacaacactatgctctcctagagcatggctaatctcgaaagcgaacttctgtgccttgttcctctgtttgggaatgttgtcgttctgaacatgtccccatccgaagagcttaaccagagccaaggcgactgtcgtctttccacatcccagcgaggcaaccggtgcgaggatgacatgtttgttgacatccagagattcgttcagccttttagcctctagagcgataagctcggatccattcattcctcgttctttgaggaactcatcccgcaaagcgatgataccgtggttattcaggtaatcatttgccatgtcagggttcctcagcagagtccgtcgagcgaactgcaagtactcttcagtgaccttctcatgcttcttgatcttggggtgtttccccctgataacggatttggtgcattcacgccactggcggtacatcaagtacggctcttcgaacttatacttgaagaaccaattccggtagggttcagttccgttatcgctcagctggcatcggatgacgaagccctcagtctcacgtccatcccatgttcctgtctccgcgcatccttctaggaagttctgcaccctgaagatgtcatcaaatacctcgaacttggccttcttgaatccccagtcgtcagcaaacttatgcaccttgtcacaagacattgtctgaaaatcaggctggttgtagttgagaccgtggaggtaaatgcccgaagaagcctcatcgtaggccagcacatgctcctcaaaagtgtcgtcgcagagttctccaacggctgtgatattcatctcgcgcagagtccgggcaagctccttgacagatcgattcacggacgagacatggcgttccacccaacgttctcctgcctgcgcgtgggagactttcgtatcgtcgcgggctccagtcgagtgtttactgcagactagcaatgtgtcgtcttccaaagcagaaatgaaaataatgcatccattctcctttacactcagctcgtagggaccccttgtgtttttctcaatgttgcgccattctgtgttctttgtctcgcctacgttgaagaacttgtcgtatccgcgcgttgcgatttcgggggtgttgtccttccgtttggtggtgaaaagacctcgcgcatatgtcggcaggccggcctgcttgtagtcccagtcctggaacttccacgagtccacaataacattattggctagcacaaaggtgtgctttttgcaggtgaaccttagctggccctttctagctttgcgagcagtctccaggcttttcaccagctgtgagatgacgtgcggatcttgagtcgccatttcttgtgagttgggtatatcaaagtgtgagatctgcacggagaggaggggcagccaagagtgggggaagagaaaaggtgggatatttttaccgacctcccacccaagaattcaggagtatttagagaaaaacgcagaataaagcataaaagaaaggagtacagaaaagatcagacgaagagtcagaccgaatgtgtcagatcaggtgcggggagccgaaagggaaaggcgggatattttctttttcagctttgacttgcctgaacatcaccaactacttctgactcacctaatttacgagttttaatcaatacttctgactcatggctcaaaatccttacctattggcctgcgacaacccaaaggttcttctggacctgctgcggtccaatccttcgatcgcatcgagccaggatgagtccggctactcattgctgcacgccgcagcctcctacggccataccgatctcctacgcgctctagtgaaagaattcaatgtcaacgtcaacctgctcgacgaagatggcgagacatgtctatttgtggtcgagaacagtgacattgcgcgctgcttaatcgaggagctgggtgtggacgccaataagaagaacgccgaggacttgacagccgtggaaaagtttgagacagaaaatgagttcccgcaggtcgctgcctacctccgcgaagtcgtcggtggtgctcccgctccaacacacgcccaggccgcagaagttttgaattcgcccggacccatccctggcagcaatatgaaggtgaacattggtacaatgacggaagaagaggcaaatgctggtggtgagcctgatccagaattcaagaggcgcattgaggagcttgctgctcgtgaggattattacagcgaggaggtgcaaaatgaggtgcgcgagttggtcaaggatgccatggccggctccaatattgaagctatggaacgggaaattcggaggagaaccgagtaagcagaagcattgcgactgttccaacatctacatgaagccaccatcgcttttgaacatgcgaatcactggaagaaatccacccaagcaataccaccccgagtcccaaagtctctgctgattacatcgagcgcggacgggtactctgccgtgtcttcgggatcctttgtgtctcacttgaagttttgggtcgcgctgtgaagggtcgctgttagactcgctgttggcccttggggcttatccaagtggctcggaggccgaagagaagctccgatatgatcttgtaactaggattgaatcacgaaatatcacgatacatccattgaagcaattagcgcaagatacttacttgttaattggagatcatactagttattatgttgatgcaactgcgtagatcaccggtctagtccgccaagctcgagcccatcccgcatctccaacgtaacaactagcttcctacctacaacaacccccaacattatatcatggctcaaccaccgtctcctttccctccacaatcgcagttctactcatcccaaataatgaatcccgagacacctcctctaccacctccaaaacccaacagccacgaagccagtcgaggcggcaccccgcaaaatacctctgcacaagcctggcagccagacaaccagacaggcgcacaccaaggcgcatatcccaataatccccaacaactctatatccccgatcccccaacaatcgaggagggctggctcccagaactgctatcagacaagtcgtgggttccctcaaccttcaaacccctaaaaccaatgacaacacctctaacgcgcacaaacccagaacaaccgacctccagacaattatcaaagacccaagcctgatatccgccctctcaagccaacacgcctcctatacagcccgccaacaacacctcgagagcctaatccagaccaacaaagagctcgcaacccgcgtcttagaaatgcagaatcacctcgccgaagtccgcgcctccaccgagacgatgctgatcacacaccaatcgctagaggtctcctggcgtaagaagcaggccgagatggatgccgccctagccccgtggtcgccgaaggcgctataccagcgcttcagcgcggcgatcacggagcaggaagccgtctgccatgctgttgaagagagtttcctcgacgaagatcatcacggccgagccacagagaaggagattgcagattgggtccggcgcgtacggggcgaggcatccaagttggcggctcgcaaagaggccaaggcacggtgggatgagggtcgagttgggggttggcgatgaggtccaaacgcaacctcaagatacaaatatttactgtctgactgccatttacgatgccatgctgcctccgattcatgatctgtttattatgcactatacaatgcaatctacacggtgcttcaaggtcttgcttcatccgaatcacgcttaaaccaattccaggaatcaatcgtccactcacccctcacccctcatgcctaacagcctcactctcactactctccggcttgatacgtccctgtgcctgccccctaaacaccatatcccgcaccgcagccgcaccctcaacatccacatccaaaccccgctcatcggcccacccatcagtgcccagagaactcggaaagccaaccccccgcacaaaagcgcgtctccgactgcgcgcaccccaagcccagccgccaccgcgccgaatcggaagatggtacatgttaaacgcgatataagcgaagaaaaggccgatcgccgcgccgaagagaatatcaaagccattatgtctgtaattgaaccagcgcgacccagcaataaagcatgccgtggcagtcgggaagaacgcaatcagcattaggtagacgggcggcgcggcgccgcgtttccgcacggataaactatcatcgctgtagctctggtcttcaatcgggtagcgcgggagataaggaaatgcgacggagaatttcgagcagagccagagggttaggtaaattaagccggcgaaggagactggattgtgttagctaggattcgaatttatgtttgcgtactgtatgttgtcactgtaattacgcgtcggagcacaccgaagatgatatgcacgtaaacagttagagtaaatatggactcacaagaagaatgcccactcggaaaactcgcaaagccatcaatgcgcaacgaactactcctgtcgcgacaaatctcccacgaaacaagcgtcgccgcaccccgcaccgactccccaagcccgccaactgtgaactccgcaatgcgcgctacgtctggattgcagcgcgcgagaagatcaggtcgcggctttccgattaaggccttcagaccctgggtagcggtccaggtgcttgcgagggccagcgcgagccccatccagccgacgttccattcccagaatttgcggcggatatattgcgctgcgggggatttagaagagccggggttagaggtggaggtggaggaggtggccttcgctgggacgagtagccatgagaacaggaggattataatagccggggcgaagaggcagactaggagcagggttttggttgttacggtttctttggtgagggggtagctgattgttggatcggttaagctgaaggggtggtggtttggaggttgtttgtagaagccatagccgattagggcgatgccgctggtcgggggtcgttaattgggattttgatgggttcaatgggttggacgcacatgatgaatatccagtcgattatgtaggatagtactagaagcttggaaatagctgcgaggcgtgtcactgtctctttgacggagattggcatggtcgtgtgtgatacgtaattaggaaggaaatgttaaaaaaaataaaatgaagttcaagaaagaacgttggaaaaagtacatagacggggatgacgatgccagggatgattgtggcggagtaagaaggttaatttattttgaatttactcgaacacttcagatatacagtagcaacagttcgaagaggttgaaagaagattagatgactccatactattcatagatagtatccattgactccactttcctattgttcaggaaagtttatcactagatacaggttatagcaggagaatgtcgagaattgcagttttcatcaatttccaccaagcgaggtggttaacgcagtttgcttatatacaaactgcctaggaagtgccaagctcgcatgctacggatagcctcagtcggccatgaggacttacgatctgaccgaatagtagtttcttggtagtgattcatagagatagaaagacttctaaactacccatatgcatgtaagtagagcccccgagattaacaatttcaataatatcgagccaacgcctgcaattccaaagaaatagccaaagaaagatctagaatccagtaatcgtccggcggcccatgatggcatcgttcagctgtctgtgaacctgttgaaccccctcgaaccgaatgaatccacacgattcactttccaagtggttgaacagactagccagggagtggaactccttcggacagcctcgcttgaggcagtggtagaccttctcattgtggacgggtgagttgacatgcgaccccagcgcttttggcgagttgaacccctttttgcataggtaacacacccagcagctaccattccaggcattgtcggtgaccaggtatgtcatgtcctgttcatgttcaccgtgccacgcgatctgcttcttgcagacaataccattcggatcaagctgttgaataatgcggtggatgcggtcgcggttcaagccttgagcttgagggcaggcaccagactcaagatgatgggagacaccgctggcagtgacgaagccaacccgacagaatggacacgcaatgttggtgccgcgatggatcttggaattcaggtgctatgagataaagacgtgagtggaacgggttcaaagtttctctcggatcatatcagctcgcctacctggcgcaaacagttcgcgttcataaattgacggctgcattcttggcagtagttcttgtaatgtcctttggcgctcatatgattctccacggcctgctgcgtgtagaatttcatcgggcatgcctcacatggaactttcgggagccaatgactcttcgcgttcatatggttgttagcggcgtgttgagtgcggaaggtgctgttgcaagtttcacagtcgaaagtcggcgcccagtggtctacagcattcatatgctgattgcaagcgttctgggtgcggaacgatcgattgcatgtttcacattcgatccagtgacgttcgtcatccatatgctcatcacagtcatcctgatcccagaatactgcatcgcaggtgatgcattcgaacatgatggactgatgtaaaggtaaagaatgatattagaagaagaaggggagagagagaaggatatatagacacatccaagaccttatctcttatctgctgagcaaacgcggcctgtacaacacactccgtttgatcgccatctaaaagtacacaaagacaacttagaaattattagaaagatagttgcgatgcatattttaggtaagtgtatagatatgaagcagtataaaggttgcttagaagatgcggtatcaactacataatgttatgaaagccgtgagagctagaaactacccctcaacctcacacttccgggctttctgactcctccccaggatgactgtacttaggtcgcccactggcagtgcgatggggaaatcgaccgcttcgaggatctgcgcaatgaaaatatgccaaatcggaagacagagggcaaaggtgaacgcaccagccgcctattgataaatcagtacacatttaatatcgaagagaacaataccatatttgcaatataccttttgtaatttggccgccagcactaggttccccagcgccatctggaaatatattcctgaaaataatccaaatgtgatcacaagcagaaagagcgcgaggaagaggcagacgttcgtgcggagggcgcaaattgtgtatacgaaggtgatgagtgcgagagtgacgtagtagaaacctgtaatatattcggtcaggacgtgcacatgtacatgatggggtgtgaaaggtaagactcaccgacagttgcgctgtattcagcggtctccatgcctttcagtgtgttgccatcagacgagtacattgtgccaacggcaaagaatggcatgagcgatgttccctgaaccagccagaatgtacctatgagctccagttagcaaatgcatggatgcgtccctaatccatgacgaactacacataccatatgtgaagaataatgcgcaagaaaatgtattccctagaatccattcgccaattgctccgaatatttgtaccattgcaccgaagaagatatagactggtctgtgggagggagttgttagtactgttttccttgcagcatcagtatggcctctcttacaaaatggcaccaccgtttccacctgctcctctccatcccatggtaagcattgcggtcggcgtcgcagacagcaagaaacccatcaatgaaatcggcgtgggatttccaaatgtggaacgcagctttcctgcatttggcgtcttggggctaaggtatagcttttcaaaaacatcccgtggtataggaagcataacactgtcggtggtctgataccgacgaagcatttctgccgtagaggtctctggcttgtcgccgatagtatcgtcggacattttggattcaagggaaggatttttctttcttgaaaaccctagcaacggcggctcgatggtaatggtgctgatctaacaccggaagacagcgtggaaaagaaaatatatgaaccagaccacgactcgcagccccttttatgctctttcggctattcaattattcggctgtatatctaggaaccgagcctcgcagggtcttaccaatctgttaccatataattctatttttgcaacaattacattctgtatatcttacacaccttcttgtttggaacaaagtgcggtggtattccccacaatcctcaaccaaaccccggatttgctccgtcgactggtaaccagcaacttggtctcggcctatagcgcgcaattaaacatgcgcgatccaccttgcaggtgaagcaattgggtagtatgattcgttggctgaatcacactagatgcagaacgggttagagcaatctcgtatcctccctagttttcgaattggcgtggggcagacagtggggggtgtgcatgttgcgcggtagtcatgtccgctccagttccgcttccccttttcgtgttcccccgcaatggagttgaaagccgaggtattggatctgcgggtcggcttcctagtatctagttttgatctatcaataatggctgaggtataaaggcgcacgcgtttattatagactcgcccagacctgggccatacttctttagctggctagtggcgccaataaaaagtgtaatcagtaaagcttgcttcggtcaagtcatattggccgcctcggcagttgggctggcaaatacagccgcgctttggcgagatgatattccgaccttgtggatgtgtggagtttggggaaaacctggggccccaggccccagtggagcttcaggaggataatgcatgacgtcatcaacgagtgattatcatagtcgatccaaaaaccaaccttgcaagcttgggttcacagagatctgacaatctcttacgccgcgttaccaccgcgattgctatcatagcccggcccataaagtcaatataatgttttattccggacgtgcaataaggggatctcgacaggctaggctacaagcctcgatcgttatccacgaaagagaaattgttcaaaatgtaatcaataaacagagacaatccggacagctctactcactttcatatatacaatatcagtcacactatgcacgagttattatggcacaaaccgatttacaacgagtggcctagacacgtcaagcgatacagtgataacatacatagattatacatatcttctccaagtgtctgaacaggcagaatgattgaggaaaaattgtgcagaaaactaccaaatattggctggaggatgaagaaaaagagaggctctgcgggaagtggggccgcttcagaccgaggatcggatctcggaataatgctgttcctggtagggtggtgcatcgtcacctttgaccagagacaaaatttcccagccctagacatcattttagctaataagacaactgcagggcaggcacttgagaaccactgttttaagtaagctacttgggatgtagaacgaaatgcttcagccctagctcgggaatcctacttaattctcctgttttataactatccttttactcgaaagctactagaaatatagaagatatagggactttcgagtactccatgttgaatatctgctctaaaatatattagcgacaagctcgcccgtaaatgcacgaggtattaaaatttaccaacgacgcaaaaatcacttaatacgttgaagacccgagacttagcagatctcgcgatcttctacgaaaaatatacgcccggttaacgacaaactcccccgatttgaccttcccatgaaagatatccaacatggcttcagccacttcataaactgcatcctcgtcgggaagttctccaccaacacgaatcgatacacagtgagagtacctatgatgcatgggtaattcgtcgactgtaacttgcctgttcacgacgcgatacatcatacggcggaccaactctagatcgttaagccaggcctcttctgggtcaaagtacaccgtggcccacacaacatgttgtccagatggtccgtcggctacaggaacatcgtctatacgagtcctgaacgcggttcgtgttgacatattgggtatgaattatgggaatgagcttggggattggctgtagtgggagtttttcttcttcggtggaacagggagtgagatagatggggctgggtgagtattccctcttcgagtggtggtaatgcctgggcataggagatcaaggtgttcatatactcccaactgagacatgatgatatgcctgactatatagtgggttgcttgggctcttggtagaaacaaagaatcttttaacaaaacaaccgctttgtccagtcttcttattctgattgtcttattgtctactaattataagactcgaagtcattctttgtctaaactcatacccactatatcaacaaaagaactcaatccagatcaatgcaaccctctcctccaacctttagaaagcatccgaccttaaatgaaagaaccgaaaaagtctctcccgatcaatctgaacattcccctccgcacattccgcctgataaaaaagcgccaaatccaacgcatccctaagaaaggcatcaaaaaacaaatggcgaaactgtggaaatgcccaataattcccacgggtcggtaacgagagacaccccatgactctgtggtgcatgggctcgggggtaatcgagatactgacacggtgtgttttcttagcgattctcgcgtggatggcctcggcgacgagatccatgaactccgcgtctgttttgtcgcgattttctggggtcgcgacgaatacgtttacccatactatgggtccctcgatgtcgcatctctcgtcaatgtaagcgccgtcgcgggtgaacataccttgcataccttcttgtgccatattgaattctttgatatgagggccactccaaactatttggtatcggctttaaaacagacaaagccttcctggtgtactggtggttgaaataggaattttatgagatatgctcgtataattatattacttgggatattgtcagggctttgttggcattgaaagtctatgtttctttgatacaatgacttttttgacatcaattgaagataagctagaaatgatccccattgtgggttgttaagacaaagactttgaaattgctatttctgtttctacatagttctgtaatgtatgtcggtcaatatcatagcttcattctcatatactagcttctcatctaacgttatgtactccgaattctactatcatctatatacagtttcacaaaatcatagcctcacagcttaatccacctccccatccaagtttcaacaacctctttagcctcgtcaaccagaccaagatcaagcaacaactgggttgtgccacgcacagccgaatccaacgccgaaaagatccaagcatgtgtataactagtatgctccccaatgaaaatagtcttaaactccgtctggtagtaagcaggcaaataaagctcctgctgcccaacaagcggactagcccaagcgcccgcctgatgctgatcgacctcccagcactggcgattgtatacacccgtaaactgctcagcagcaatctcaccatggacctcaaccatcgtgcgctggaccagcgcaacgtgttcttcctcgctcagtgccgctgtcgaccgagcgggcgtgtccgagatatatgacgctaggatcacacccggtccggtcgcattcatgttataggagggatagcacacattcccgaccccggggatatcaactgacccacatccgccgaagatgggcttttccatgtgctcccagaaccgcgtcttgtagagcagtgacatcttgcatgcggggctgtagttcatagtcgagattgcccggctcaggagtgatgagtaccggggtagatcccacagtctgaccttgctgaatggtgcagtgaccacggcatagtcgtattcttttgtttccggtaccatctggaagggatcgtcgcgccatgcgactgcgactttaccggctgtctcgttatatatcagtccggcgactgtgcggttgagagtcgttttctctgcgacgtgtgggtagaatgcgcgagggagggactccagacccttgtcgatggtgcgccatttggtggctgcgaagtagacgtcgtcatacatatcgctccagattggagaggtgtctgagccatcgacatagtcggttatgttggtattgtagcccatcgcgtatttcaagtatccggcctcggaccagtggaacatgccgtcttcgacggcttgcttgtgggcttgatacatgttggttgcgatcttgcggattgtctcccggttgttcattgtggtatagttatcgtatgcggattctgcttctgcgacagctgttgcattggacgaggctgccttgtagactagcgatgagttggcagcgacttgggcggcactaggaattaagccgttggggagacggttgccgccagaggctgcgggcacattggggctattctgtatccaggggatgaagttgacctggagatctcgtttatgtttgttcatcttgttgagaacgccggcgagttggaagaccatgcggtgatcttggatttcgagtgtctcgttcgtatcagcataggtaatgctaactgggaaccgcatcggtcccatctcctgatattgatactggtctggagtcgtgttgttgaggtatttcgtacggatgcgaccaccgactcgcccagatgattcatagatgtgccagtcgtggataccaacagaatcgagcagcagactcgtcatcaagccggacattccaccacccagaatggcaacagaggtactcttcgctttggaaacaaatgcttcgccgtgcttctttgatttcatgtaggccaccccgtcaaaccacgggcccatggcatctgccacatcggcgatactctcgcgcttcttgacaggtgatgagaccatgatgggagaggagcggcccacaagcgtcgatccggagaaagcatgcagacaatgtgaatggggtgcgtcggatggtgtagtccagacgaatcgctccggctgcgcctcgcgtttcacaaacgtgcttccgatctcatggtgactctgcgtcgggtcttggatcccgcattccccgtagacaagctgcagatgaccttcgaagtctctgtccaggaactcgacgtggacgttatgcaaagagtcggaagttacacccccagggctgtggaaccgtattacctcgatgtctctccccgcgaccccggctaggcttaaacctgatagacctaaccccaagagggtatgttgtagacaaactttcatccttgatctgagcagtagaaacgtggaaacaaaatatgagcgcttggcaatagtctaattgcctccatgcttgccgtacacgttttatatatctttttttttgttcgactcaagtatcttcggaagattgatcccgtatgtcaagctatcattatctttgagggggtatttcactgcaaccttcttatctagcggtgatattgtagctggcgaaggtatgtagatacgatttctgcatccgcaatatattactatagcctctgcagcttgactagcgtccatatcatccatcgcaaactgttacgtaaaatgacagcattctaagggccagtatgaatttagttagcatctcagatctagccagctagagacccggaatttttcgagagcacaggtcccactttgtcgagtgcagctgtcagtggctgtcagtttctcttatcaagacggttgtttccgactgctatgttatcttagagcggggtgttggagctgtctggggatcgatatgttgtattctatgttaagcgcggggaaggatatttcttgtagtcaagatatgggtttgatttggatcgacaatctcgatattcttatcagttggattcgtaacagtccaggaaggtacaaccgtgggtacataagtacgtaggataagaagtcagagccaatacgcttgagtctgtgaagcggctcggcaagagggctactctccaattggtccattcatcagacgatccgggaattttgatatgttcccagtgttccagttgatccaccacacgtgatgatctgcgggggcatttggctacataggtttatattaaattcctcacaggggaggttatagcgaagagtagagataagtaaataaagaagtatattaagccaagcggaatacttccatgttcggtacttccaaggctaccggtatgtagccggaaggcgccggacccactcggccattgcgggggaggatgatgtcatgctgatgcctgaatatgcctgactatgtacattgacccttgacacacaaagaatttccattgaaataccctgataaacgcatctaaatcatctaaaatgaaattctagataggagactttctagcccaatacagacaacctcggcacagtcatcgcaaaagcactcgaccagaagacctcgaatctcatccaagccagccttaacaccaaagcatcaaactggaatctgaagtccaggaagtaagatcggggtaatccgcgcaagagggcacgatgtggagcctccggtgccatctccgggccaagttcctctatatcacctagtaaggaaccaagaagatcgagttggtcgcagacttcaaaacatttgtcctaattctccgggctgaagccaacatgttgtagagtgtgtatgatgctctttaaaatggttgtgaaggtttcatgtgcctagttgaagcgctgttcaaggtcttggggatcttcggatgaattgatctttgggaggagaagagaggtgttacccccaaggtccttgctatgtggtatgggtaaattttgtagcgacaagtcaagaatgtagatatcaatggatcagtagggaattgttccaataacgacagctcttaattgtaggtggtactgagactatttaagcccatccagccagctttctcacattaagaaagacaatgattgaaaacatggaaatcaacagaactcagatgataggatctctctttcctgcctctatcctttggtcaaagccttgggtagaggtgtaaaggaagaaatacattgtttttgctagtaatttttaaataccacagacaaagggagaaaattgaaagagattttacatggaaacgattgaggtatcatgcatccatggatgcatggatggtatattgggttatgagcaaatcaacgctaaaagagcacaaattggatatcaaaagttcatcaatcatcaatcacaacatatcgttgtctcctccaatttccgtatctcttcctgcacgtcatctattcccactgtgacaaccatccaatcacataagaacttgcccagtcccgcaccaatgaagatgcaaataatcacatagacattgaagtacatggccaacaacatggtgatataagcccccgcaaacgtgactgcatgaatcacagccctcgtcaattgttgtaacggcgtcgcgcgaaatgtcacggcggttctggcagattcaaatctcctgacaaacgtgccgtgtagggcttggcgctcaaattggcgggtcaggaagttgtcatattcccgaccaatgcgccgacagaactcgactaacacgaccagcagaattgtgccaatacaggttgcggcaaacatgccattgttcttgatctgccatcctgcggacaggaaacaggcatcgatggtgtcgaaattgaacatcatctggctttggtcagcgaatccacttgaaaggtgccaaggtccaaatatcttggcactcaccgaaaccttgcagctgctcgagctggtgctggaatccatgccctccatcttggccggtcttctgggtatgcgaggatgagaagttgaaaatatggcgcgtccgatatcagctcgatgccgctgttcttataacctggtggcttctccccacctacgctgaggcaaagtggagaaacccagcgatggcgtgggagaaatgtgctcaaatcgccgcaaatgcgaaaatggccgcgttgaacttggaagttgggattcgcgtaatggcaatgaataaaacctcgtgggtttctcgcacagaatctcataatctctttcgcgcttcgccatgaccagataatcccgaccggacgcagaattaggtgttcttttatcaactcgaactcgagctgaattgtcgctctacactcattggaactgggctgaggctcataatcggtcttcaacatcggcctactgcatagggcagctcaagacataatgtcgtttccaaaattggatgctcgccacatccagaacatgagcgcggcgacatcattagagcctcattggggatactacgatcgcgcccttccctgcaccaacgatgcgggatcgtgcgcgtacctcgacgatgtatacgcatcacatgaccggggaatgctatattcaggcattatgtggtgtgtcattggcacaattttgctcctctgggtcgtcctgaaccagttcaatacgccaacgatatcaccagcactagcagcaccagaactagccggactatacaaggtccgccgctctgttgcctcattagccaggaaatatctcctgcctgatgcggctcggctcatcttcggccgcacaacacgcctccaagtgctcaccctcgctctgttagctggctacctcctcatattcagctttgtcggtattctctacaacacatgggtcacgcccgtctcgaagatgcccggtgtatataatacccgcaacagcatcggcccgtggtcagaccgcgtcggcacactggcctacgccctcaccccgctctccgtgctgctaagcagccgagagtctttcctctccctcatcaccggcctgccataccagagcttcaactttctccatcgctggctgggctatattatcttcctgcaaagctccctgcacacaatcggctggtgcgtcgtcgagctgagattgtaccagccgcaacccaccgtcggaattgaatggatcacccaaacatacatgatctggggtgtcgtcgccatgatcttgatgttcttactcgtcgtgctgagcacaccgtggggaatcagactcaccggctacgagaccttccgcaaactgcactacatcctcgctatggtctacattggcgcctgctgggcccactggaagcagctcaagtgcttcatgtggccctcgctgatcttctggttcctcgatcgcggtgctcgactcgttcgcacaggcctgctacactaccaccccaaccactcgggtagtctcgggctcggcttcaagcccgccgatgcgaccatcacccgcttcccggacaccgaacacggagatgtcatccgcctcgacctgcacaataaccaggacccctggtccatcggcgaacactactacctaacctttgcgaagtgtagtatctggcaatcccaccccttcacaccactcaacctccccgtcgtgtcgaagggtacagtccaacactcatacatactccgagcgaaaagcggagaaacgaaaaaggttgccgacctcgcggccaccggcacacctacaacacctgtcatcttgaccggcgcatacggcgagtctatcaccagtcacttgacaccaagcaccaatataatttgcgtggccggcgggaccggcatcacctatgtcctccccgttctgctagatcttgcccgccaaaaaccctcaccggaccgcaaggtcgagctcatctgggcagtccgccacacggcgaatacagagtggatcgcagcagagctggatctcttgcagaaagcgcggaatatgttgaacctcgagattcgcatttttgctacccgagactcgaggagcaagactccctcgatcgagaactcggattccgaaaactgtaatctctcggtcccgaatattgaggagaaggccgtgcaggtctcgccttccaagtctgtttctgcgtgctgtggatgtgataaacctactgctgtggagcggctcgggggtgcctcggatgatgtcaatagacatccggatcttccacggctggtcgatgatttcttggttgatacggtgcgcggcccgacgagtgtcttcgctagtggacctggtggtatgattagtgacctgcgggatattgttgcgtcctgtaactccggtgagaaggtctggaggggccaggagagatttgatgttagtcttatctgtgatgatcggttggagtggtgaataggatgcgaggagaggggagttgtatatattgcccaggtggctgtattcgccaaatatggaatcatcataagttgtggattcaatgtacatatcatcatgacgaattttatggatcatctatcaacagaaatatgggagtgtagaacaagtacaagggtacaagggtcacaggttttgttaatatctcttcgtggctgtccgagtctacgaggaatatgcgtccactacctagatgtaacgaatatgaggtggagtgagtaagaggatcgaggatcttctcttcctatgcctcgatgatagagtcatatggcttagatgcagagatagaccgcgcaataatagagatatgttaaagtcataaaaaaaggaaagacctatgcctacggttttgatcataaattggaacctaggggacatatccttccaaaaatggaaggtggatccatgtcacgtatggatgcctaaacatgccttgatcctaacaatggtactatggcaactatcaaaaatatctctactttgtctgcccgttgacaatagcatcccgcttaagctcaccactaggcaaaagcatcccagatcgatcaatgaacgaccgcgctcgaatataagggtccaatttccaatagttcacgcagaactcatcaataacagcattccgtcgcgacttgagctcctccgctttcgacaccttgtccttcccgtcagactgtgagctggcagagacccacgctgctgtcgcagagatcatccggattccaatcatcatacggtcgtacattagtgagtcgcgcgttgcggtgtctttcatgactgcattctcgtctttcacgggctcgtcgtatttataggtccatttttcgtcaccggagaactctttggggatcttgctgcgcggaataaacttgtccaggtcggcaattgaccgcgtgaaatgcacctttgatgcgacgacggggtccatccagccgtgaatgagtttccagatgcctaaggtgatagctattgtgagtattcattgtaatgagaaaggaggatttcttaatggaatcattcgacttaccggagaaaatccagggtgcattatggatgagcagttgccccagagactcggggtagtttgcttcgaagcatctgaggatgaacttgactggtgggtattcctattgcgaatattaacacaaggcagtcatctcatctagcctcagtacggtatcataccatgttagataacccgaatcctgtcaaatcgaagacaattgtctgtgaatgtgtcagctgagtcaatatctcacttttggtcgaacatacgcccgtttcaaccggaggagccaagataagtcgcgtcgcctcaataacatgaacaatatatcgctcaagagcttcctcactctgagcacctggcttgtgaatcttcactctagcatagataacaggtcgaccgtccctgtccaagccatgaaggaagctttttcccatcttgagttggttgataaagtcggcaccttccttcttctcctttgacgtagttttggcactacgggattgctccagagcatattcctctccccggggcagaatttcttcatcaacctccatctcctttctccatagaatgttcgacgccatcatcgaaaatgcctttccgacatcccatttcctggcgcgcaagaaccggagcaacaaactatccgggttttcttgcttgatcattttcaatatcgcgaaacacatttctcgaggcgtcatcttagagaggatatgctccatagacttgatctctgcatcttgcacgcccagctgtcggagttgcgagaaaaggaaagaaaagtgcgccggagtgacctttcggttggccatttccgaaatgatggtgtctttggcattttcattcatgagcgagtccaccttgtccagtgatttctgctctttattgtcggagtaatttccagttgtgagttctccatttgtttcgctattcgatcccgctagtgcgatttcatatgaggtctcttcattggtatcttcgtccttcaatgcgctaataatagcttccaccgttggctcattgatcttatccagagcagcaaacagcttgctggaggagtccttcggaatcggtatgtcatatacagccgacagaacagttgcaatagaggtcagaatgatgatccaaaattcaattacccttgcttcctggtcaggagtgaggtggccgaggtgcccggacataaggtcaggagtaggagacatggcgtgaattgtgggtagagggtgaagtgtaatgccgactgggggaaatcagttcgtattttgctcgcaagcccgccgacggggtcttgttcaatcattcattgttaacggggccacatgaatagcagggatgcctcggcgaccttcggattcacgggcgaattcaaaattgatacctcggtgtttgaacccagtcgatcgtttattgagaaataggtgctaggacctttaccttctcgtgggggatcttgaaacagctccgatggaacggacgccctgtgagggagcctggcgatgacgatcctccatattgggggaagatcgtcgcctctagggagttcgatccctctcgattttgacctcgaatacgtaggtgcgcggatatttggggacgatgattctagtttcaccacatttacatatgaatttaatctaaaccagctacgtattcggtaagtgagctgcgtatgtaagccaagatatatgttcctggagttcagctaaagagaccttggaaagattcgtgttctaggacaagaacatatttaagagataatcatgagcagcgtcgaaaccagccttgtccgaatacttagcggcatgagtacaaaaccttcaatgacgatatcgagatcttcctgcgtcgccgaaggatctccccccccccccccccccccccccccccccgccgccccccccactctcggtcgtatcatcaacgtcactggtgaccccattgacgagcgtggtcccgtcaaggccaccaagttcgctcccatccacgccgatgctcccgcgcctgcgtgtcccgcagtccgttcccgattcctccgtttcaatccagtaatcacgcccggcattaaatcttcgtagtaagcccccacccaatgggcggcctactcaaaatcgctcgcttgggcaccttaccctcttgatagcgaataaccttacccagtaagtgaagtgcccgatctctgtcatctcgctgcgattgatacttaaactgcagagaagtgattgggctaacagcttctctagtgctaactagtgtcctcctcataccggctctaacggtggttcccagctgagtgctcggtatcagtaccctgtgcagtcagccccgatcccttccagcggaggtccgacatcccatagagatggcggatccgtccaaatggtaaaagacgttttattgagtgatgacgatcatcttcttctttgaagcctgatcttcaggtgcgtactcgataatgactaggttgattaccacgtgacctgtcgctccgtaaatgttttgctcctcgatggttttactcccctctacatatccctagggttttgtaaagcctctttttccgatagttctatttgcctttgtaacatatttttgatcatcttgcaaaatgccaaagaaacagccacgtgcaaacatattttgccattctgagttcgatttactttccgttttatcccttgcaaaaagtatacgtgggaaaccttgcttttgcgatgaatctcaacatccgaaaagtggcagtttgaattgggctatatctatatattttgaagatggtattgaatgaatattccgttctcctcgcaaagactattgtatgcttcaggaggagaatacaagcacattccttgcaagcgaggcggcaacgctaagttatttacgcgacaaaagtgatattcccgtcccagaagtgttttcgttctggtaatacctgcctacttgagatttgctgattgaattgtgtattcggcttacaattgaacagtccgacgcatcagaatgatattggcgttccctatatcttgatgagcaaagcacatgcgaaaccgcttgcttcttccggctgggataacaatgttgatttggatgaaggcgcttgaccacgtttgacgctacagcagaagcgaaaggtcataagaaaattgggcaaaatccacgcatccctttcgaacatacgatttgatcgaatcggatcacttttgcgggtagaagacgattatactctaggaaagtgtctttctccagcccttatgtggcatggccgcgatgggtttgatgaagaccatatcccactcaggccgtttgacgacgcagcatcattctacagagcgcagaccttcgctttgcttactcatgtcagagaacttcctatgtagcaccatatgttccatgcaccggtacctacacaacaggaatacgatacgttcagtgaatatcatattgctactgataggtggaatgactacgttaccgtgggggcaaaaatcgagagcgcaaaaaataggctcggctatacctcggctgcgcttgctattttggaacttgttcccttgctagcagaaagagacgatcaaattctgagctctggcttcccattgtttcatcccgacctaagtaccagcaatttgttcgtcgatgacgatatgaatgtgacttgtctaattgattgggcttgcacttcatctgttccaaagtcaatgttactcgtttgtcctggactacctcattcccggaatccaacacccctcgagtttgtagactctttcgcacaaggttttgtttaagggaaaggtttcgatgcccaaacagctcttcttttcgagaaaagcaaggatctttgggaatttgctcgcttagttaatatggattctattcaagattttaatcacctctcggagcttttccaatcccttgcccctggacaggagctttttgcaaagctgaatgacatgaaggaatgggatgagtttatcacctcgttgaaaatgatatcccaatacaccgccacacctgaggaaatgcggaatgagaaacagtattttgaatgtaacggacccgagagattggcgctggcacgccatatctcaacaacggcaagtcttgatcctaagtttgtggcagatcagcgtctctggaagtgggtcgtgatatacttgaagcagcgagacacatatgttccctggccttgagaaagaagttaattgaaaggtgtggaactacgcaaataccgtctcttactaggtgtgacgcttaaaattgtgttgtcgcgagaaggataccatagctcgcgacgtcttgtttgataatgtcttgatttctttctccgcattcctaacttcacgaatataatgtacaatcgaaaaccaagcggccaaggcctatgatatgagaacaccagcaagggctcctaaaagaacaactggcactataaaagagcagcagagtccgaggagaggtgtttcagaactaagttcctcctcgatttccgctcgtgggtatgatatttccttctccgtggtgagcaatctagagtctctggggtgataggccggagagttgaaaagatgagcaatgggtacccaattgtggacaattgtcaagaagcacaagtgcagcaatggtggccatgcaaatgtagtgagcagtttaggaatttctgttccatctccggtcacagccacccagatcgcaaagagcatagctccaacagtcgcaataaaaagacaaatgttcaacaaagcaccgctttgaagagtatctctgtatgccttttggaacgacgaaatggatgtagcattttcgctcgaattggcggtgcttccggtgacaaaagatccctttggcttgcttccgaataggtggaatcgtgcaatggcgtacagatgggctattaacacaacatgttaggatcaagtttcaggttccattagatatgtggaaagttttaactcagacttaccagtagaaagccaactgttctctgcatgtgcaaaaggcgcaaatggaacacccgcgtgtgcactccgagcccagtcatatgcccatgtggacgcaacatgcacgatggctaaaacaagctgaatcttcacctccaacgccgacccagcaggaataaacccaccatcggagaccagaaggaaaggcagagcaacaaatccgattgagtaggtcacaagacctgccatgatagacagtcccccaagagcaatatcccaacgcagatgctctggaatcgccttgttgacagaagggagcaacacagaaatctgctgagagtgtccgatatgccaccgattccgctgtttgagatgtcccgcgagagaagtaggaacgaggccgaattgcaaaacctcttgtacctgcatcgtgcgctttcccagccctcgtaaaatcaacgatagctgccaatcttccgagaaagaataggtcggatatccacctgcgtcgagaatcgcgtcgcgacggaagactgcgcctgaacctgcgtctagcgcatgaccgagaagatcgagttctgtattctcacacgtgtagaagtaagcccgcgactgggagaggggatcgccacagggcagattatagaaatactgtcgcgtggtcagtaatgctgcctttgggtcttcaagtagatggggcagtgtcgcgcgcagaaactccggcatcaggatggagtctgcatcgacgactgtgcagaactctggcgggtcttcggtttgcagggagaatagggcgtagttaagatttcctgctttggcgaaggattgcccggattgcttgccgcgggtgtgataggataggtgagtccattttgtggcgagttttgcaattgcgtcgtgcaagtcagttgacgctccatcatccagaaggcggactcgaaaccgggaagctgggtagtctaaaccacatgctgctcggaccgtgtccaggatgatttcgactggctctccgcagcatgttactagcacatcgactctgggcaggttttcgttgctgcgtagtctcttgcggagtgtctgatgtggtggctttgtcgttgcggctagcgataagcgttggtggtttagggaaatatctaagaagatcagcggatgctcatcgttctttcttggaaggtaacgtacgagcaaatagaccctcaactccgagcattaaccacctttgccatgtttgctctgggctcatcacggtgaaaaatagccgcactgtaaagtagatgtaggtggtccatattgctgcttgcgctatacggcggagatatttccgatacttctgcgcatacagagcgcgatcatcaggggaaagctcctcgatgtcatagacgttgttaggaaacattgaagcgaacttgaagccgtcggtttgtgccgttgtgattctgttgcatattatacagatgattttctttttgcgctttttgactggggatatcaagaataccacgaaacaatttgtcttggaattttcacaaattgaccctaggcttttgaaggaaagccttctccgccgaaattaaggggtttgaatgcattcagggctccccatttgcttctggaacatactgtgtctatttatactactccgtatccacctggagactatcgctgccgagaaccaatcagtgcaccccatggtatggattttgatggcgctagccttaattggccgtaaactgcaagtgggccatttcctcagcatccgattggatccctattctataaaattctgagatagccggggactcgctatgaatatactgtctgaggtaccaacagtgatctgattcggtcggtcttgtcaatagaaaaagacgaatatagaatcccaaactgtcacaagtgataaaagtacggctgatcaagggcagatgacccgggtagcacgtagccggtagcctggcggtatctctttgtgatgatggcatcctccttggttgccacaccgtatcgttcaacattccgatacggtgcgatcaaatatcccccgcggagagctggaacccgaggtgacgactcgacacaagcaaaatgttgcgaactgaaggtctcatcacctcggtatcccagtcgcacttgacttggccgaagagagcattcatctaacgaacatatttgcgatcaaggtcttatccccgaatgtaatcattgattcttcacgagactcttcagagaactggttctcacaggtatttgcaaatttaatatgaccaaggctcaaccgatcgaccatccgtcttatcaatgcgggcagctccaaatggcccagcgcagttcgagccattgcatgtgcctcttgtgatttattaagaatatatgttgcctgagggtatcataaattagcacatgcttaagcaggcaaccttcggtgaacatatagttgtagactgagcattaattcaacatcaacatcggtagatacaagtgtttactctactaccaaataagaaaaaggaaaaagcaggaacttattagtatcgagagagatgtatatgaaactataaaaaaagaaacaccgtaacaacgaaacaacgaaagggctgataactcccatgccagtaccctatgcctaggccacgccagcgcatataggttggaatgtgtatgtttatatttcgcggactgagcagatcgaacgccggcagccggggttacctgcatgttgaatccgtgtgagcccactcagccactgcggggactcccggttaggaggaaggtattgctgtgaaatatatcggaacatatgcttccgaaaagggaaggtgggccctcacgggttgatgcctgaatataatgtttctgcctgcagatcacacacacacttattagtattagaatgtacatatgtcctgccacaggaagaaagataaaagcaggagttaatgggtgaaaaacaaaaaaaaggatgaaaggggtgatactcccatgccagtaccgccacgcccaacccaacggcttaggaacgcatatgtagaatatttataatcgtgggctgaacgccgacagctggggttacctgcatgcttaatacgtatgaagccactcagccactggggggcggaatttcgaagaacaggtgttggtcctaaatttataggaacctggagggcatgtccttcctaaattggaaggtgggtccatacacctcatatctttcgttcttgatgttcctgcatttgtgacctggttctcgccgatcgaaagaaggggacaggcgttattgaagaagaagatgtataagaaggccgcggggctgcttcatggatctatagagagaatccaaagatttcccgagaccttgaaaccttctgtcgtcgtagtccaatagagttctgtattttacaaaaagaagagcgttcttttggtctgttcacccacatacataatatatagaatggtggcagaccaccaagatacggatggtgaaccggcatgcattttgggaggcttctcctgttaggccttatcataattaaattcatgaatattttaacaatcatttggcattatcggggtatcatacttcctttccaattcagatcaaaagtagtatcaaaatccatagattagacatgtgatcggctcgatcggaaccccgcccgatacagacggaacggaatcaatgcgagtcgcgattcatagatagataaagaaagccctgggattcgcacagaaagatgaaaaggaataatttaccatttgaatagcacataatatcacatttgtccatcatttgccattcctgaccaagaatcgttggtcattttcgaaatgacctcaaacaacccctcataccttattattggcgcaggtgtctttggggtatcaaccgcctatcacctcatccagaagtatcccaatgcgtcggtgactctggttgatcgagacgcatatgatgccgagtcgcgtgtggctgcctcatgggattggaacaaggttattcgcgccgattacgacgacaaggtctactgtagacttgctcttgaggctcaagaaatcttcaaaaatgaccctctttggcagccatacttccatcaaactggcgtttactgggcgtgccgcagcgactacgcgcaaactgtcatcacaaaccataaggaactcggtcgcaatgacgatatcattgctctccctgtttctgaagctagaaagctttatggaggaatctttgacaatgctgattacaccggtgttaaagaggttctggtgaacagagctagtggctgggctgctgccggcgatgctcttcgagcagtgacaaagaggtgcttagaattgggcgtctcgtacgtcaccgcatccgttactagccttgaattcgatgggcatggctcctgcactggtgtgaagacacaatctggagagacattgtcggccacgcatgttatcgtcgctgctggggctttcacgccgactttgctagagtggagtgctgtgaagagcggcaacgctggactacgagctggagagcgaattcttgcggctggtattacgaccggaatggcacaactgaacgaggaacaatacgaaaagtacaaagacatgcctgttggcttccagggctacacaccgaatgaaggtacgctttccgatatattcgtacgaatgccactaatcattcccaggaaaacccttcattggcagcattccccctaccaaagaccgagagctcaagtggtggggatctaagattttcacaaacactcgagaggtagtccctgggcattacctctcttctcctccacccacgaatgactacaaccagtggaaggttccaggacctctcaagcaggatatcgtagaggccaggaatctgtggtatgggcccgaaagtgcaacatggcagatgacaaagcaccggatttgctggttagtgcccctgacaacacattgattgattttctaacactcgaaagggacgctttcaccacttcctcggactttatcatttcgcctcactctgcctctaaaggactatacgtcgccacttgtggttcattccatggatacaagtttttccccgtacttggcaagtatatcacacagatgcttgagggagaattggcgcccgaattgatagaaaagtgggcatgggatcggcagcggcctgactcgtccgacaacgtggagtacccaaactctgagatgaaacatttactgggacctacagcgaagctatagaggaaattggataggcattgaccagcgcgcttgctggggatcaccaaaactccattatgatacgcttgataagacatgatatgattttcattgacgttctgaataactacttaatatcataacgactgtttgacattaggtttacagctgatctagaagattcctcttgcataatatccgttaatggcaattaagagattagtacatggagcttattgtatattgagtcttacaaactcggctgctggggtaaagtttacatcctcgctaccccttgctgcggaacagcccgccaccgtttcgggccaacacatccgagagggaaaatctgccccgagcgctgaaagagtcgcttgcacaggagcttcaagccaaaatacttacccatggcaacctaaatcaatccaaaatcgtgattcagggcgggaaaatcccagggatcattgactggggtgctgcgggttctagtactttgccctgcgatggccagccctcgatccagagtggcgcgaactctcttcatatatcctaccgccaggtgaatatgaatattcgaaaaatatcgactgctgcgtgtatggcaacactccatatttccacctagcgtgagaggaaataagcttaaacttcagagtttgatccacggagttccattgggccctgtcggagacattacctaatcatttgtatgggccgatggatcccgaggtcgggttatcggcacccaattcaaccgggtggatgccattcggcgacttttgatatcattttacagggccatgtcgctgaatatcctgatgaatggatctatgtgtcaaagtgggattgtttctagggtggagcgttaaatttcttggatatttcgcaacttgtttgcctccagaatcagatgataaggcacatcaaaagtttccgatgataaatcaatcctcaacttccccactgtagatcagtacataaatcaagccacccccccccctgcagaatggaattgttcacacatataataaatatattcaataattcatacctagcatcatcaaaatgacctggcctgatgtctccgttaagcccgccgagggcatctcatacttcacccctgcccagagtcccccggcaggcacagctcgcaaccctcaaacgagcggaaagcccattcccaagctgttcgagcctatcaccatcagaggagtgactttccacaatcgccttggtgtatgcaattcccccaattccttccataatcgcacagctaacaataaccctccagttggcgcccatgtgccaatacagtgccgaggatggccacatgaccccctggcacatggcccactacggcggcattgcccagcgcggaccaggaaacctggtcatcgaagccaccagtgttgtccccgaaggccgcatcacccccggctgcctaggcctctggaaggactcgcagatcgcgccgttcaagcaggtcgttgagtttgcacacagccaaggccagaaaatcggtgtccagctcgcacacgccggccgtaaggcctcgactgtggccccttggcttggcggcgttatcgcgaacaactctgtcggcggttggaccgataacctcaaggctcccagcgccatccccttcaatgagggcgatcccatccccattgccatgacccaggacgatatcgccgaggtcaagactgcctgggttgctgctgtcaagcgtgctcttgctgctggttgtgatttcatcgagatccacaacgctcatggttacctcctctcctcgttcctcagcgcctcctccaaccaccgcaccgataactacggtggcagcttcgagaaccgcattcgtctctccttggagatcgcacagttgacccgtgacactgtcggtgaggacgtgcccgtcttcctgcgtatctcggctaccgactggcttgagaacagcatgccggatgagaagggctggaagcttgaggacacggttgagtttgctcgtgcacttgctgcgcagggcgctgtcgatctgatcgatatcagtactggtggtattcactctgctcagaaggttgcctctggtcctgctttccaggtccctcacgctatagctgtcaagaaggctgttggggataagatgcttgtttctgctgttggtatgatcaacaacggaaaattggcagagaagattttgaacgaggatgacattgacgtcatttttgttggtcgtgccttccagcgggataccggtctcacttggcagtttgctaaggacttggatgttgagattgccatggctggacagattcgctggggtttcactagcttccgcaatgcgtccgagtatattcagcctaactctatgaaggcttgtatttttgattagatatagatacaccggctgttgactttaccggcttgtggccggcttgcattgcattcactatagatatgccatttttttttaacaacaagaacaatgagaattgatatgtttcttcatgagacctgtgattgattagaagtatgagaaatttacttcagaaacgtcacgcatattggcttcgtctctctcaattttcttggtggtccttttcgttgccgcctgttcgttgtcttacgtattcaactacaacaaagattgttccaactaaaactaaacatggaaggctaccaagaagaagcgaggatatgtgaaacgttttgattgaattctaactagtctaagagcaattgtgtttggttatctttcattgggaacatgtggcaaagagcgatctgtttcgatgggacctgatgacatctggagctccagcgctatgaccccttcagcgtacatcgaaaaccagttatatggttctcaacggacgctgaagaggccataaaactgcagatccggacaatcgcctaggtattcaccaagggaagatgagaagtgatcccctattcagagcagccatggtctcaacaaaaagaaaatccccctgggagaacccaggggatatagaataaaaaaacgctacgtcactgcttcactgaacactcgcccgaaggtcgcgacccctcgagggaggtccagttcagcaggtcggccacgtacccgccaggctttcaacaaacggttgcgacccgtgatgcatcagccgtgctagaaggatttcttgcccgcttcctgaagcgctggactcggagccaagtccagacaggttcagagttccacataaagtgacctgcaggcgtaccttgactcgcgccgtgctcgcttgggcatcggaaacacatgatgtttcgcaagcggttccataaaggggccgttgcggctgctcctctggtgtctcgcgttgctactccaacgaagcgaaagaaatgttgatttttgcttcaacttaggtttgttcggcacaaagaacaccctcaacagatgtcagcaggattgaaccaatataggtactgatcctccccatgccttccatcatacagtcccgctggaaatcccgctgtcctcccaaaggggcctgcaggtttggccagttaaagactgcaggagttgtagcgatggcctcccataaatcccgtcgcatcgactctgatcaacgatttcattggattggaacgcaggttttacccctgatccgcaccataatctcaaaacgatactcgggtcgtaagagttgacgctttatgtactagacaaatctgagcacagtaaagcccggtggatcgatcttgagaaacagcttcgaattccctccccaatcacgccgcatgcagagcgagcgccatggcttcccgaaggcgtgctgccgggacgtcgcaagaagggccaattagggagttgttcgaggcatgtgactcgaagaaagaaaccccccctcatggggccaccagatccacaagaggtgcctatagtcccaaccaatgatacagcgccccgaatatctcacgctaagttcgagagtttcgagtgagtcttgaatggaacctttcgacaatgggacaccaatagcactgatcagaagaccagtgatcccatcataagacgtccaccggcaggtattccaacgagtctcggtcgggcaggacaaccgagatcaaggaggtacccttcgacgaacgtcctatcccaatcagcacagggctgttcataacggaatgggtgagagaactcctctatgcaggtgcaaagtgccgatgaggagactcaatgacccgctgcttgggggacaaggccaagcaggcacggttaggagaactctagagagaggaagtaggggattgggaggagtttatattcgcccgtggatgcgtcccgagatttcgcgcctttgtcgattacctaagcattgccccactccagcgcgtcccgacgcgtcgcgacacgtcgaaactaacttttaaggcttttctcacattcatcgtcatatcgatcctttctgttccgatttttttagtcattgatagtggacaagctccacaaaaagacctacactgcaagtacggagtagtctacagagtatatttcaggaaggcgtataatctttgctatgttttttgccctaggttgctggttatcagtgtccggtcagagtaattcttatttttcggtgtatgtgatagggaccaaaagtctcagggaaaagagcgaacacagtgcttgccaggattttcgtaagtcttctgactttcgcgaacgtccggcgtcagatattatcattattccacctccaaacaagaaacatttactttctgggaatttaaacagctcacggcaaaacctccttccccatccaatcccaacacctccctctccctcctttagcctcgggtgataaccccacaagcacctccaacagcttgtcggctgcatcggccggctccagcatttccctcgttccccaataatccttggtgaactccgtgtgcacagtcccagggtgcaaggccacagcaattgccctttccgcactcttcgtgcgcaaatacaaatcaaaagtcttggccaattggaatacagctgccttacttgcacggtaggaataccatccgcccgatgcattgtcggatattgagccgactcgggcagccatcattgcataaatggcatgcgagggcagcccgagcggcccttgggaattgattgcagagctaacctctattgtcgggaatttcggtgcggatcgcaatggaacgaattgggaaagatgcttcaggagtagcaacgggccgagggaattgactttgaagctctccagcgcattggcagcatcgatttggctaggcgatttttccgcatgtaaaatgccggggattgtcaatccgagcctgagtggtgtgttcgggtatttctggcggattgtgtctgccattgctgatatcgtagactcatctaggaagtcgattagcgttctgatgcagagaagaatttattttcgaagaattaagttgctttttcttacctgttacatcaacttggagaatacggagcctctgttccgcgtcttttggcatacccttgcttgccagcagtcgttctttaagttcatcgcagttcttgcgggctgttgcgatcaccgggagctctgtccgtgtcaggagctgctgtgcgaaggcgaaccccaatcctcgcgaggcaggggttactagcgcgaatccatgagctgccgataacataacttatttgctgaactagtttcgctgatggtatatgttttagtggtgagggatagtggaaacaattatagcaaggagttgctagttaatgttcagcgtatatgtgacgtcacaaatcacaggtcatcgatttaagcttcgatctgatctacatcgtgaggctacaatgggtctaatttaaaacaataatcgacatgtgtatactcagtatttatgacttgttttagattcactctttatctcccaacaccctcacaatctatctcagttctttccctccagaccaacaaagcactctctgccaaactcgttgctgctatcattgaaacggaatttcctgttgagtttctcaatcttcttcatgtcttctgggctcagcttgaaatcccctcccagattggccctgatcctcacaggtgttttagacttcgacagcaccgcgtgcccctgcgtgactgcccaggctgtcgaacaactgcagttagtatcatacagactaaatccatgcagattccacttaccaagagcaacctgagagggggttttgttgtacggcttgcctatctccgccaacacaggctcatcgagcagatgggcggggcgcttcccagcatagagagagttctggtttccaaacggcgagtagtgcatgacaagtataccctgacttcgattccattcggtgaaatcatgctgctggagccacggatgacattccatctggtgcacagcgggaacgacggaagagttcttgatcaagtgctccatctcggacttgttaaagttcgagacgccgatcgccctcgccttgccggttttcagaagctgttccatcgctttgtacgtctgcttttgtgtcaacggctaaattcatagatcaagatatgagaatgctgcatacgtcggcaatgtcgatattcaccatgatcggcttcccatcctttaccggaaagagttcctcccctcgttcccaggccacaggccagtgaatcaggaacagatcaacgtagtccatgtctagatcgtccagggattgctgcatagccgatgccacgtcgtctgggtggtgcttgttgttccatagcttagttgtaatgaagagctcttcgcgtgggacaccgcttttcttgacgcctttgccgacagccttctcagttgcataactagtatacagtcagttctgtacattgagttcgccactcgtctcattcgggaagcaaagctgctcacacgcgtgcagtgtcgatgtgacggtatcctgccttgattgcttccgctacggcatcttcctgtgcatccgcatcctgccaggtgccgaatccaagggctgggacctcggctccggtgttcaacttgaattttgtgggcatcttagattgattgatttgaatgacgattcaacagttcatgttcggctctaatatagagcaactccaaagcacatccaaatcctgacatgattatcaaagacacgtcaaggtgacgaattcatgtttgtgcttgtccggggtgatgacatgaaaatgatgttttcgcagtctcagagtaccactgacgagcgaatgatacctagaatatcgccaaaggcgcgttcgtgttcatagtcatatggtttcaataccctgcaagtagcaatatattagcgctgactatgcatctatccattaacgtcttgcccaccttgatttctctccgactcatcacgagcacgaaccttgacgatggatcagtctatgaccttctcccacccacaaagcaatcacgctggcatcttacggcttctgacatctccgacagccacttaattatccagaattacaaccgccaacgtcatcataaacaatacggagtacttcttcccaaatcatttcggtctcggcacgctcctttgcatcggagccctctgcgccatatccaccatatccaccatctcatattcaagaatccttctcatatcaatcctcacgacgatcaaaattacttccagctgaaaacgaattccttcatcatcgcgtcgttcctggacgaaccaccccgcagatcccaagcaaagatggaaagtacggccctgagccagggaagggctcagtggtagtgttccacccttagatacaatacgaccaccgccaatcttcgcaccgcatatgctcgaaactacaacagattatattctagaagaaggatgagctcggcctgctggctgttcagattggcgaagcacggaacgcagtcctaacaacaccagatttataaagtatctctctaaagaggtggaaagtattcataaatttgcccacttaccgctacgtaaggagatttgggtgtactataaccagcataaccctgggcatgtggatgtctttcatgagacgttgatcacgaaagatggtttatgaacatggatgcaaattgccatccaactgctcggaagaggcgaggttaagggtaacagtcacaaagacaacacagacacctgcatggggacacttgccagtgctaatacaccgggtttgaagtcgttcaaagcaaggcttgataaagaggattagaacccgaggggaagtccctcctgcagctccaacagcaccattggaatgacttggtagaacagaacagtaatcatgcagtcagaatagggtcaatgacaacaagttgcgtagcttccaaaacacgagttacgtaggtctgcggacagagtaatgacccttatccactcagtagcccctttatgacgagccataccattatttttttgcttttccatttgtatctccgttttcagtctctggtatgggaattggccctcctggggagttctccagtctcgccgtcaaaacctcgacgcctgtttctgtgacaagcatagtatgttctatcaattttgatgttagtattgaaatccatctctaaaaggtctatgcgcaccaaattgggctgagcgtttgccgtccaccgtggcgtttgtccagtcatctggccaagtcatatctcggttggttcccagagtgaggataggttcgatcgtgaatgtcatcccgggtttgcatgttcccacggccttattcttcgcgtagtggggaatccaaggaggagggtggaattccgagttgataccgtggccaccccaagtcttaataacggcaaggcccctagaggctgcgtgtttctcaatgatcttaccgaactctcgaatcggtacacctggcttaattatcgcgatagccatatccaaggcctcacgggtcgtttcaacaagcctgatcgattccggatcctttttatcaccaacatagtaggtctcgttcaagtcggcatgatatccaccatggtatagagaaacgtcgaggttaagaatgtcgccatcaagaagaactcggtgatcggggatgccgtggcatacaacttcattcggagatgtacataccgacttaggaaagtggttgtagttaagtggagaaggatatgactgccttacgctttagcgaacaatttgataagttcacataggagtaaatatcactcacctctcgctcaacgcaagcattatggcaaatttcatccaggtaatctgtggtcacgccgggccttatcgccgcagcagttatatcgagtacttctcgagctaacctacacaccttacgcatggcgtcctggccctttgcatccaacaggtcccattttgacctactcaggcgcatctcacgctttggaatgccagtcacggcccagtcgggatgcttgattgttttaggcactggtcgtcgcggggagagtggatatacgggtctgacagagcccgtgaacgggtatgtcggaaaggggtcgtaaactccgctagctatatcgcgattagagaatacagtcacgagtaacttggaggtagttaccattttgtatcttatgcaccgccttgtgtgtggtctagatacggatcaatgttaggttctcggtaagaagaggtccgcgtggacgtaacctacccaatttctcttgaagcagtcttgagcgcagaagtaactacctttgatgcccagctttagacacgttgggcattgcaaggtcccagcttcattgtcgcaatcggccccagagcacgtcccatgatcggacattgttgcgaagtgaaattcgaccttgggtgggccataagagatgggaggagagttgtgtggaaatgcgcgaaagatttggccaggctaatgtacctgaatagaccgccttttatactccgtactgtcttcctattaaatatactgccgacctcaacacgctaggtcgtactccgtataggaattttaaaccggcgtagctggcaggtttcaaaaggcggtcaatttaggtacgttccttggacccaatatttcggaggtcccagtggcacccattatttcaacagtgtttacccccgctataggcccaatggcacagcttatcgagaacctgaaaatcggcggtaagagtcctagaatctgatgtttgacatacacatttagcgacagtataagctaatacctgcttttgactcacagatgctggagtcgacatccccgttctcgcccccgcagtaaacggaacttcaaaagaaacagaggattcggacgacgatgtcgctgaagataccccggcagtagctgttgagaacggcggtgccaaaaaaaaagaaaaacagaaagaagaggccaaagaagaaacaacagaaggttcagacggatccaccatcgattcccttatcgcagctattcccgaacaacacctaccccaagggcgaggaagttgagtataaagacgacaatcgatggcgaactaccaacgaggagaaacgacacctcgacaacctcaatggtgacttcctctctgattaccgtcaggcagctgaggcacatcgtcaggtccgtcagtgggcacagagaagcatcaagccaggtcaaacgctcctcgaaattgccaacggtattgaggatagtacgcgatatctggtgggtcatgatggcttaactgaaggtgactctttgatagccggtatgggatttcctaccggtttgaacatcgataacgttatcgcctattatagcctaaacgccggttgtaagactatacttacgtagagtaatatactgaaggtcgatatcggcatttatataggcggtcggattgtggacagcgcctttacaatagcattcgatcctatatatgataacctactcgcagtcgttaaggatgtaacgaataccggcatatgcgaagcgggtatcgacgtttgggtaggagaattaggcggctatattcaggaagcgatagaaagctacgagtgtgaaatcaacggtactacctacccaatcaaagcggttcgcaacttatgcggccatacaatccttccgtattctatttatggtactaagactgtcccctttatcaagtcggatgatatgacgaagatggaagagggggacgtttttgctatcgaaacctttggtagtaccggtagcggccgatatgtcgaaggaggcgaggtctcacattatgccctgcgcggtaacgcgaacaccaaagacttgactttgtcttctgctagatctgtcttgggagctatcaagaaaaacttcagcacgatccctttctgccgacgctatttggaccggattggacaagagaagtatctcctaggtgtatgaacttccattacggatatgtgattggaaatcttgactaacaagaatatagctgaataatctagtgaaatccggaattgttgaagattatccccctctaaatgagaaacaagggacctatacggctcagtttgaacacgtaagtcatttggctctccatggctccagggctttctaaaagcagaataatcactaatgaatataagactattctactccgaccaaacgtcactgaggtcattagtcgcggagatgacttctaaacatattcgagttgatggttttatgtctcagggtgcattcaaatagttattgaaataactatcatgattagtatattgacctctccccttctacgcatgacgaatgcaaataaaactcccttggtgtttgtttcctccgtgctagtcatcttataaattaccacctgtttccggcgaaggatcgatctttgcttcagaagattttgagtttcggtgctgatactgcttggcagccggtaatttgcctacaatgaaatcaatttagatggctcctatagtcgcagatcatgtgatctctgaatagcttcatgttgacagataaggtgatccggtgatctctacatagtgttacagtacagttataagtcatgtgatgattgttaatttacacgataattgcggccagcggtagacttacctgaagtagtttagcggggagtgtgaaggattgtgtctgtatactaactccagggataagctcaacacctgaagcccaagctcttcagcttcttacaggcagttggtatactagtctatcgaggccaaattagcctcaaaagtcaccatacttgcatatggaagaactaagtggaaacattgccaagcagaccaagctgtttgatgccgagacaaacaacactaaaggtcacacgcgtctaccgtagcttaccgctttagtttatatagcgagctccacccgcaaatttttttctttccttctgcatcgcttggaattctccagctctcacttcttttgtttttttcttttgtcagcttggactgtgtttaatgatggcacatactccagctatattcatggcctgctaaggctgcgaataatgctcagtttcaatttttccaaaaggtaaggaaaatattcttctatccttctcaatcccaaaccccggggatgattatattatagacatgcaaaggcattcctcaatcagaagatccatgttgaatctgtcatacttttaagtttcagccttgtctgacccatcacaacattatcacctttataagccattcattgagtgatctttgactaacaatatttcgctcaggtaaattacactcggattatgtcccttccctccattgcggctgttgcctagcatgaagaaatttgaacgaacgggcggacataatgtacccatctccctgcatccaacaaaaacagagcgtacaaactctgtgggtgtatgggaagtggattacttgttgagaattcgtcacctgaaccattgcccttgtcacaattatttcattttgcatcgacaatttgagaccagtatttctaacagaaattctaggtaatttatcactcatctctttctgcccttctcaacatggtcaaacctatcatgatgaatgtgttattcacactgttggacttggaccttgtgtccgggaatgaacatttatacaaaaatctgatttaatgaggtatgtgttgcttgtcgattgaataaaaaacgtgtttcatgctgactgacttaaagcctgactttagttgccatgtcttgatttcacttttgcctcatgctttttgcttgaatgccaacgctgactcgacataagtgaacaaataggaatacccacaggtgaccatttggctcgttgaccgtgagtttattctccttccattccctgtctcattgcatgatgaaccccaatatactgttctatctctgaactatcatgtcgataaaatattttcaccttggagaactgatcttttccttgtctgccatcatttcactcaacttgtgatatgatcaattgctaatatgcattacaggagccatcggtcatttgtaatagcctaatatcaaataatgaattttctcttctgaacatctgaacactccgcgctccaaaactcccggctttcccttaaattctcgtagccactcgctaaccctttcctatacacttaacccccacgctcattggatgtccctactcgaaaaacaaaccatgcttcttgtgccattgctcaagactatcttcaccgtacacatcgtgcacactcttctttccctctggccaccgcgcccacgccggcttcgatccatccatgatgcacaccatctcgtcgggcaccggcaactcggtatcgattgcggaggcaaacggatgaatcagttcaggccagtggtggtcccaaagccacagcatggaactgcaattcgagcagaagttccgctcggaggagcaaagcttctcgtccggtgtgccgcgatctttgatcccagagtatttcctggcgatgacgttagtaaatatgcacttggtattatgggattataattctagtgtataacatgaaagtttctcgatgggtgttatggtcaaaagtgaaagtaggtggtgatataggtcttacttgatcagatctttgcccttgatgatattcaggctatcggcgatgccgccgaggttcaccgcaccgaggtatccgcctactttgcggcagatgctgcacgcgcatagctggtaaggaactggtgtatgggattgcagggtaaattcgacgccgccgcattggcagcttccttcgagattcctatggatccggttaatgtgcctgtgtcggggatgcaaggcagtactgatgaagcctcacgtacataggcatgatttggtgtgtttgtttgataggctttgagaagctagtgagtagtacgagtatatcaaatagatttttcgatagaaggttggatttttgtccagaattaggatgtggtactcgatatatatacttccatcgaggagagataacaggtttaacaacaaacccaacaaacagagcaaactgcacaggcctcgtatgatcaaaggccgtgtccaactctagacagcggattttccattaatagagctatatccgaatgcccgagtccaattccttaaacgccggattgatctctgcatcatcgacccttcctcgctactgtgattggctgaactactgtttgtcttgtttgtcttgtttgtctctcggaggtttcattcactttcgccgactgatactcatcttgctagctactttctcgtcagtaccaacgcagaatccttttctgttgatattttgagcggatatacgctctgtactttcggaaatgagtttcggagcccccggcggtgggtcggtgaactataagccatcaccgtgagttggattattccaatcgtgcatatctgtgcttgcaacatgttgtccagcgaatgaacgagatcggatctcttgctctgtataattgctgactcaatggaacggtttgcagacccgagcgcggtagctttcctcttgatcacgaaggtacgccagcccgcagtcatacggtccatatcccgaaggaactcggcaagaccagctaatccgatagagctaatcaaaatttgggacgctttaggggaatgcaagcacatcatctcaggatacctgaagtgtatcaagttgaacagaggcaccaacgacgaggcatgtcgcaaattggccaaggaataccttagctgccgaatggacaagtaggctaccccgatataccgaggaccaggcattgtcaatggatgaacaattgtttttgtgatgaatgtcggagcaaaatgctgactgagacaacttgactaggaacctcatggcgccggataacttcgagaacctcgggttggtgtttaaagatggcgcggggaaagcacagactccagttacaccagctacaggtgcaacaaacccagaacagaagagctgatataggactgcgagacgttggatgatattgtatgatatggaggagtggcgctattccgtgatattcaggtagtgctggcattattcaaggcgttgtatataagaaaatgtatttggtacctaatctaacacatggaataagtaaatatgacctgtgcagatgagaaagcatcgaaattcacaaaattatatcaatctgaaccgcggtggcctgttggctcgccctatgcggttccccgcatgtgaaaccgtttccgcccagccactcttacaatctccaacccatccgagtcccatgccaccaaatgtcatcgatcgcccgaccaccagatccctgcctcgtggcaatcatcctcattgtgcgctctcgaaccgggccccgcctcgtcttccactaccccccgaatcccctcagcgagaaccgcatcaaaaccactaccaggggtggacggcgcatttcgcgcaatcgcacgcgatctaagaataccgattcgagctcgagctccgagagcgactcgacctccgacgaagacgaagacgaacgagaaacccagagccatgctggtgggagttccttgctggcgggtcgccgcgctagcaacttcggcctcgatgatcatctccaggttgccacatcgcctgctgccggtgaaccccaacgacctgggtcgctaggctctgggcgtggttcatcggctcggaaacgggctgcgggcaccgatccggaccccgacgacgatgcggggacggcgtctgatcggcctgaagatgggagctctaggccgccctgggagtcgcttttgggtgtgcctgggagtgtgtgggagaaactacttagtccgtctcggtcgtggcataagcggcgctttgaggttgggattaatgatttggcgcttattggttggccggtttttgtgcgcgaggatggctcatggcgcaagcaaagacgcaagaagcagaagaagccccgtgctgaatgggacggaggggaattgggtcacaatgatagtgccgaggagggcaagaaggacgagcaatttgttatttcgcctgatttgagtgccagtgtcgcttcgattgcggagtcattggcatcaccgacaggcagtaagcgtgggtcgaccagtggacggcctgggaaaccggacgagtcgcttgatccggaggacaaagaccatatgacgatgttcaatgtggtgtttgttgtagatcctcctttgctggagtactccatgcgcgtgaaggaaatctacgagaatatcatcaagaaatttgccaaagctctcaaatgggaacaggctcgtactgactatgtgtggaaggagtctcaacatattctgcaagtcaggagaagagcacgagagacaagtatgctttctgctaatagccatccgccggagctaacaccctggatagaaacatcgacccataatctttactccgaattgatatcccagtcttctctagctcgagctatctacacagtctacagcagcatatcggcatccaaaatcgcttccgtatcgctcagcccagatgtctccatctcgctccagattccacctttgacctctacgtcatatcttactggtcctatggacaaagcatacccaggcttgtggctcacgacagcagacagtgcaacccccgccgacgacccaagtgtagatgaaagcagcacgccgcatcaggtcccagcaaagcactttgctctacttctcttagacagtgaagccgccattatcaaggatgtcgaagcatctgggggagcgcttgcccccgcacttgcgcattatatccgatgctccaagccaaccaagtcatttgcgcagatatcagtctcatccggaatcccactatcccatatccagatgctgtcgagtcatcttgtgtactggcgtcgtgctcgcgccatccctccaatccaccaacgagacacatacatcgtctctccaaactgtgacttgagcaagcttgaaatagctacgattgcttatcagacagctttcccaacataccctagtttggccaaaatgctttccacgctcagtggcacccctcgcccttatagcaacttcatccccagcaaagaccacaaagagatatacttcactatcctggcctggctactgcgcggcggctgggtcacccagctccgcactttcgcgcgaatcaaggtctcacccgaggtcaaaatggccgtggagatggcgctgcgcaaggaggaagtagagcgatacttgtctaggggcaactcaaactcgatctcggtcgatgaggacagcgaccctgacagtgaaaatgacgatgcggactcttcctcgtcttcttccctcgacagccacggcagcggggatgaaacgcccatgcctagtcgactcgacccacacgcacaactgcgcttttctcacaaactcctcgatcaatcaacagctctccggctgtcctctttaattccctccccgcaccgcgcatccccactcgagtcccgctggcttgacgaaatcttctcccgattccccgacactcccagaaccatgcagggagatggaaactccagtccggatgggacgtctaatgatacccaggccctgcacaagaagtactggcctgttttcctcaagtatttcaatggctacgatgccatggagaagatcagcgtgcgcgagaatctcaagcgcaagctcgtctggcaggtccttatgcgcctgggcttagtgacgggtccattgggcgctatggatctcgatccgcgtgaacaggtgttagttagttttcggcactggtaggtggtgctggtatgatgttgatgtagagtatgaatatggaacatgataactatccctcttttacatggacgtaggtttccaggtgtcggtttatatcttccggtgaatcccactacgtagtatagatcagacacctgaggtatgttattttcagtgtaatacagcccgcgtattctgattacatacccactctgccattccgatggtttccgcgtgccctcagccctaatcattgccgaaagcacaatgtttgatcatggatttagtaggtgaaagggaattgaaatggttcgtatttgagttatttagtttaattgggttgatggttctagtatttatatgaagatataaaagaatgacagtgttagggcaaaaatagtagcagttcattcacatgtaaggttggaagcatacaattatatcacattcttttcgcacaatgatcagcacggcagtaggtaattttttttcccgcaaggtatgtaatataatatgcaatatttctccaaatgtattgatatgtattacgtttaccctgaggatttcatcaccggcccgcatatccgaataagcaacggtccaacgggctgaagattataggatagcaaaattattgggttgtagtcgggcatatgtagactaaagttggtgataatatctgtcagtagtatggtattggtgctaggatattttgtcactataagaaagtagtcattcaaagaaaagctcgactcttcccatgttagatatttccattgtgcgccaatggccggaggagctccggtggtccccgcgaggtttagatgtattttttatgtatgtatgttttgccttagattgatgagccgaaagttgatataggtattctgtggtattctgtgggatatctaatgttagtacctgaagagaaactttatatatagagtagaaggtctttgatggaaggtttctagccagaatgccatagtgctatccaattggctggacatttgttgcttaagacctcagaaccctgaagcatcgccacttagacagctattttaatcatgggtctcctgggctggggctgttattgggtaatgccatgtgaagaagcatgcggctcaattttatgactttgaactggttctttgttggtttcatagactgtataaaaagtacattgccgatattgctgacctcggcaaggcaaatacacaactagaaggggacatagcatatataagacagggtattctaggggttcattctgcactgcgtaagaagtatataggtactataggaatatacctctagtacagaatcgtctccgagatgcccgactcctctgtatataggactatatacagggcagtgagatgaatgagaaggaatatagagattcaaagaaatgagccttgaacaattaagaaggtaaatccaatgcaaaggaagtaaaacccttttatgcgaaattccacattcaaaaaaacaaaatgtgcccttcaaatattaattacgtgtaaagaaaaaaccccgctaccagttctgccctgaaccaaataattttgtgtcttctctctcttctctcctacaacttctccccctccgcatcgggctgttttctcccttcctcttccgcgacttcctttcagattccccttcggtacctctccgtctcagagagaaccgagatacttcatctgttccgaaccttcccacgtgcgaatcgccagtcatttttcaagggatcgacactcagcaattgatcttgtgcttcacatccaggttatcgaatcctgacaggaattacacagcgttcctgtgaatccgacttgcaccactcagcgactgagcttttacgacccttttcagcctggagacgttgacaaggcagtgccttaatcgcgtcctcggtgggaaaattttccttaactacactttcctctttattttctgacaacttgtgtgctcacaagtcacggttgttgaaatcagcactccacaacgagaaatcgtcgacccacttatcaatgcgatttgtggtctagacgatcctcaccgatccaactccttcgattaccctttcgcgacccgatacttccgtggtccttcgtcgagctcgtttacacacgaatcgtcctttcgacacacaattgagagtctctctgaaaagacgggaagctgcagattagtggggtcacaagaagctggaatctttccctttcttggtttccactttgcgcaagtgccatctcgcccccagtaggcgtagactgagatccagagttacccaaggtcgtccggtaaaataaaccgcacctcaaatttttttccccacacactcgatcagagctaccataagctctcaatacgacatgtctacgttttcgtacgcacaagccgccaagggcgtctccgggacaccggccctgtctaagacaccatcagaatccgagaagactgactccaaaccggaggaacacaccaccgtcgagactacaactgatgaagcaccggcccccacagagtccgagcccgttcaacaacccgaggtagtcgcagaggagaacaaggatgatgatttcaccactgtcacgaacaagcatgccgccaagacaaaggctatcaactctcgaacatcaagcccgagcgttcgcacaggctcaaaggcgcgcaagtcaaaggaggatgattcccatacccctaatggcaacgcagatgccaccgctgagaagcaggctcccagtgagggacagaccgagaaggccgaaggtgccgcagagaagtccgctgaaaaatccgaggattccgagaagatcgcatcaccacccaaggagctgaaggctgctcctctcccatcagtcaacatttggcaacagagacgagaggcccaggatgccaaggtcaaggctgtccccaaatccacctccactagcaaggccgcctccacgaaggccgcctcgactgctgatgagacccagcaagactccaagaccggctctaagaagaagggtgccgatggtgcacaggaaggcgccaaggatcgcaagaagaccgatggtggaaaaggacgcgatgccggatcagttcccccagtagaagacgctactgcatggcccactccccaagttgcgattggcgaagagaagaagaagtctcacgaaaagaccgaaaagagccctgtcattagacctcatggaaaagaaaagtggacaccagttccttacgttcctactgctgttttcaacaccccgctcccatctgctggtggtcgtggaggtagacgggctacccgtggtggccgggacagcggccgtggagctcatggaaatggaaccgctaccaccgataaggctgcctctggacaggccgcccaaggcgcaaagcagtcacctggagaccgaggacgcctcgagtctggatctggacgtgccgcttctcttcccgcgcaatcgcgacggtccacaagcactgatgccggtgccacagccgatgcacgcaaggcttcccaggcacccgagcgcggccgtggtgctcgcaacggagaggagaacaacaagcaggtgaatggtggcgagaacggcccccgccctcaacgcgagggcaagcccattggaagaagccaggatgcccgtgcaggagaccgcaaccagaagggtgccaacctggctgttgacttgcaggctgcagcccgtggcaatgaccgtcgcttcgaggctggatccaagtctgccgaccccaccggtctcactgactttagccgtgaacgtggagagttccgatctgagcgtggaggtcgtggatctaaccgcggccgtggtggtgcctacgccaacttcggcggccagaatgcccagttcaatgcgtctatgtctaacaacccattccctgcgcctaagtcgttcggcttcaacgagcgtcagcggtcacaccagcacggcctccccaatggagctcaacaaggaaaccgtatgcccctccgatcgccctctgtgcccactcccgcaaacatgtacggtgttgtttatcctttcccaggtgatatcaacacgatgtatggctacccagctgccccgatgagcgctgttccctaccagcaatatgtggagcctttctcgctcatgaatatgctctccatgcaattggagtactacttctcggttgacaacatgtgcaaggacatgttccttcggaagcagatggattcccagggctttgttcctctgaacgtccttgccagctttaagcgtgtcaagtccctcactgaggactttgagctcattcgtcacgtgtcccgtcagctccgtaacgttgagtgccagactggcgaggatggtgtcgatcgcctgcgccccagagacaagtggcagcagtgggtcctccccgtggatcagcgtgagcctgctgcccagaatgagggcgccgcccctgctagaaagaccgacgagaacaccccggttcacggccactccgagaacgttatcaacggatccgctcgtcagttcgttcccaacggtgtcgcccatgatgtcaagacttcactttcgtctaccgctccagaattcatgccctcattgctacctactgcagtgaacgaaattgccaatgtaggatacccctggaacttcccagtctcccctgatgattcgagaatgtcgttcttttcgtcttcttcgtctttccctaatttaattattgactcttctttctcagcgcgtggactagattcgcagtccgaaccccctttcccctttgatttggaatcgatggtgtccccgacaaggtatgctgaattttttgcatgtgaaatatattatgtgcggtactgactcactgtacgaacagctctgatgcagattgctttcaataccaagtcggcggtactgattggttgatcagcaagtcttttgccgaagcgcatcaaccggcgcctaagtcaaatgggaagggccgttcgtccacacaaacgtcaaattatgtcccaaaaactttcaatatgtctcgcaaagaaaccttcgatggccgaggccgacagatgtcaagaaggtatagcattggaatgacccagccttacgaatcctggtcattcagcttgacaaaaaatttcaattcgcatttgtacaatgaatttaggcgttcagcccttgatgatcttttgactcgacacgttgacaacggtttcaacgagctcatggagttttatcggaactgtttgcttcaccgtcgccacattcctgacctcgttctgtacgacatggtctatctttcacaaggtcaaacatcggactaccacactctcgtctccaatacgatccatgaaaccattgccagtggaaagatgaaattacacaattgggggagaatcagcaaatatttcgatacccaactgggcaagacggcgggagaaaagttatcatgagcccttttgcatttctttctgaattttgcttcttcgcgacacgtctccttctactgcttgttcatctttcatgaccagcattattcttttttttgttcaatacggtttttttatctcttgcatgcatattcgccaacttttctagagttccaagtgaccctttcattgcaataacgcggtctggtttctcggtcaactcgaaccttcggagttttctcacctcctttttttctgtttgatgatttcattgctttttcagtcatgggagattctcaaaacgttctggcgtccgggcatgattttactggcagtctctctttcttttgatgcctgccactgcggtgtgccgggctccaaaattcgttctctttttcacccttgacatagatatttccactacttttcttgtttcctttcccgaggttgtggcttttcctttatcgatccagtcaatttgcgatccaggcctttcatcggctctgggtcttaacaagtatcagcatggcaatactcagaaaaaagcacatgttttaaaaaatatcgcctcgaggttttctgtgtttcgagtttcgtgatgtcaatcggaggaatgaatccagcatatctacattgccgatctcttcttccctgttgaccatccattcggtctaccaggttcttctttggacagatcctttgaagtggattcatccatctcagtgcttttttcttattgctggggttcctgcacagaatattttgttttctgtactttgttttcttgcataaactgggctggctgttcgggtctttgtggagtaatatgattgatatgattgataatgcatactatgcaccaaggcattaaatttgctctgtaaaataatgtgaattgaaagacgtgtttgaaactacataataatgattgtcatctataaaaccgcgagtcgagtctgatggaatgaggtcgatcgttcctgcctcaggcagccagatcttgcaacggagataattcaatcccgatccggctctaacagctccctttcccctctctagctctgttcagcacctccagcacaccgttcttcttcgccttttagcctctttacctttaaatccacctttttatcaggatggagggtgcatcccgccaaacgtcaaggctactccggcctcgtggccagaaactccttccccgtctcacacgaacctccgcagtcaacgccacacccttcacccatattcaacgacggacactgtcgaattcccctcggccctttgcaccagagtctcttctcaacacctttagaaccggtggttcatacaacgaaggacccaccagctatttctccaaccgacaaacacttcccgcgaataccgttgtacgatttgtgccacagcagacagcatggatcgtcgagcgcatgggaaagttcgaccgtatcttggaacccggtcttgcgatccttgtgccgttcttggaccgaattgcttacgtgaagagcttgaaggaggcggctattgagatccccagccagaacgcgattacggcggataacgttactcttgagctggacggtgtactatatacgcgcgttttcgatgcatacaaggcaaggtgagtggttcaagggcggttcttggttgttgtgtgggattggaccaatcgggacaaagcaatcgttaatacatcaatcgtcaattctagctacggagtcgaagatgcagaatacgctatttcgcaactcgcgcagacaactatgcgttccgaaatcggtcagttgaccctcgatcatgttcttaaggaacgcgccaatctcaatacaaacatcaccaaggctatcaacgaggcggcccaggaatggggtgttgtctgtctccgatacgagattagggatatccacgcgccggaggcggtcgttgctgccatgcaccgccaggttactgctgagcgctccaagcgagctgagatcctcgaatctgaaggtcagcgccagagcgcgatcaacattgctgagggtcgcaagcagtctgtgattttggcatctgaggctctgcgctccgagaaggtcaaccatgcttctggtgaagccgaggctatcaagctcaaggccgaggctaccgcgcttggtattgacgctgttgctcgggccatcgaggagggtggcgagaatgctcatagcgctgttggtctcagcgttgctgagaagtacgtcgcagcttggtcaaacctggcacgtgagggcacagccgttgttgttcccggtaatgtcggtgacatgggtggtatgattgccaacgccatggctgtctacggcaaggtcagcgagactcacgcccgggggctggcaaagaaaaccctcggggtcgaagacgcctctcggtcatcggagacatcgcaaaacagtcaggtgccgaccttttttgaggaacaggctgggcagaacacacagtcgaatgtcgcctcgcgaactgccgaggagggatttgaaactgtcgccggcgaacacaagaaataagcatctatacttcaccgaaccgaaacgagaacgacgactcctctcttgatgtgattatatttctttctgcctcttttgttgctctggcacctccgcccagtcagccctagtcttcagctcctttggtatatgggctggctgtttcccagtctcttcgacattcttcttgaattgggctctctgaatttacccactacttcccatctccattacttacctttcccgctcttactgcctattgtcttcctattgttgtccggcatttctttaggagtcttccaaaacgcacgagcttcgctgtgtatgtggcatcgaattcgccaaattggttcctgtatgtgtaaatagagaatttttgttgatcagagagcctgcgcggaaggaaatatctcaatgtacaagtatcagtatctttacattgctttccaggaattgtaggtcggttgtgagacatcggataaaccgggtcagattaaatctttggtttcatcacttgtacgattattgtgaatccagtagttggctttcgatcttgattatgctgccggctattcctcaaaagggtctactcaatgtactacagtttggagatagaggccactaatacaagtgcattgctaacagctcttagtaaaaagttcccctggtcctagttagttcaaaccgaatacaggagggaggacaacgtacttgaaaacgaatagaatcacgcagcagaaaccaaagaagcaggaataggttcaatatcgaacctgatctcaagtgaggaactttgatcccaggtcataaccttagaaatataatatgtacccctcggaaagatctccaggaccagatacaccgcgcacttaccaacgcgtgtacccagaagagcctggtactcgggggtgttatactgccatatcagcggcgcgtcacaagccggaggccaggtcagaccattacgcgatgaatataaaacatcctggacaaaatttttggtattgaaattgacaacatcacagacatataagtgtcgcaaagtctgtggctcagcaatctcctgcaaccgggctcgggcaatctgggaaaactgaggtccgtcacttctgaacatcgcctcgacgatgatcagaccccttccaactaggatgtcatacacattctcacagccagctagcccaggatcgccctctgccaacctgcgcgtcagtgtctggttatatatcgctttgttagtgtaccccagtgcgaaggcattctccgcaacctggaatgggatgttatgcttctcggtttgaatgagccagcgtgcctttgtaagatccgctacggtcagggcgttgggctggatttggcatgtgggatcagtggggtcttcgatccatcgttgtcgtgtagctcctccgtcttggatcttgccgtaccgccgggctggggtggaaatggctgggggtacgtctggggtggtgctcggaatccctaggggaggattggggggaacccaagactgctctgaaggtgtcatattgatgtatcagtatcttgtatcgatcactcgaatggtgagcttcattaccatatatagtatatgccggtataggtgtggtacagatatccataagaaagaaaagaagatcatacaacaaaaacaacaatgacctggaagacgacaaggacaaaggcaaggtggaagtttagacgactgaatcaaaggagactgcttctttgagaggcttgacaaagaatgaagagctctgtttcaaaagctttgtgttcctttgtgcaaatacatacttgtttgaacaagacaaacataagtcgaatgacaatataaagcctgggctttattactccatcgagtctttctctccatatttcaccagacgctttgctggtaattcaccaactattgtccaaagcagtattcacatctctggatcatcgaagccaaccctggtcttatcttcagccgcgacaatgtctcttactagacctaaccacctgagctacgaacagcatttcgagcgagaatgcgagttcttccaggaaactctactcagggaggctgactcgctcaatcggttggaaaaccgccgcgcaggaaccattcaaataatttgtgatctgatcgtccagctggaaatcgtcagacggctcgctgagactatggccagaaagtccccgatgtgtccaactgtcctgattagccccccgggatatttccgcggtgaatttcaaagcttttgccgtgcaaagattctacctggtctgattaggtcgctgacttgccttaacgagtcagacattatctatcgcgatatcaactactcagtcgctgctcaattggaggagatccacgaggactttacttttgtcttggatagccgcgagtagccagattgtcttgttaggattctgtctgctttttctaagttgctggattactctagcaagttagatgcccatttatatatccctgtacagatgttgctcaatgacattatctcaggtgaatatgacctttagtttagatacgtcgtatacgtcgcgaatacttcactgcattggttagaaagataacatggtccattcagttcgtattcaaagttaatagttatctgtattatttccagacatgtcatttcgtggcctatatcgtatatggcctgttagttctgcttgcatgtctcttgtagtcttgaacccatttgctctgtactttgtagtagacactttatttaccaactgataaatatcacatactcattttggacctcacactccatgcaccagtagtctaccatcacacttcaattacatattctaagtatacgtagattctaaataaaacaccgtaaggcatcagatgccggcaatggcaccatccaacgattggtttactgacatacttatttgtgccgttccccccacctcagctaatgtcactggtatattaacctccatccccctcattcttctcttactcttctcacatcctctacatcttatctctaaagcaataacatagcctataaatcatccaccatgtctagctctggaaaaggatacactgttaccggctccggcactaacagccaggtaggtataccccgctccatttcctatgttatatgccaacaacaagataagacatgcattcgttcttggtaattccagaccatcatcaatatgtcacttacaagaggtaaattagggcaaccattattgcactcgcgactacggttccagcgcttctaactcgaacagctaccactactccaatacgtaagctgtctcaatgcatatgataatgcagtgaacgagaacagtttattctgactagttgctttagcaatggatcctactactactccaaccccaatggaagtacctactacaacagcgggaagggaagctctacctacacccctccttccggaggatccggcaagaaataagttctcatgcaataacgtcgacaattgattggcgtatcatgaaggcctaatttatccaaagaaccaatgaatctttctgtttcctttataaagatgtgtagttgtagtgtaagcatatctagtagagaatcctcgatcacttaatgctcgaataaattgaagttcctagtcaactgaggtccagcttttccaaggttctctatattgtttgagttggttaccatagagatatctggatgttttacctcttcttcaccaagggatgaagcccaaagacaccgagaccttaacatgcaagcttgtaattgaactagaaaaataacatatgctggtacttgaggactattgaatctctccagttttttcccgtaatcattcattgacgagagaaggttgtccaggtatacactaagtggccatacttccggtagaaccatgtttgccctgctcactttgtttgataaaatcagcaagcataaaaagatcactgcataatataaaatatttcaatggtagtattccccctcaaaaaaaatcaataagtgctagttagtccttgcagtgtaattcaagagactatcaacgcgggagctcggaccaggcaaatctggagatcgcgacttttggattcacgtccttttaatatccggtctctttgaacctgagccctttgacttctatttcttgaatctgtgaccgaggaatccattcgttttgactcttggtcctgccatgttccacgttaagttcatataatcaccaaaagcctagctccgactcgatacgccgcgccgctcccctccctacccacgctctgcgcacattggcgctgatacgtgtcgcatgacctgatctcgaggcacgatcacgcaaaccttcgagaaataaacgaataaccgtgactttgttctgcggctggcgcgatgcatatcataaagccagtttggctcacccatggaggtacggagcttgatcgccctggttttctttgctcgacaccgttgggatagaaatgcagtgcttctgagagcagaaaaccaaggtatccaacgaaagaacgagtttgctaatgtttttgctctgacacaggtgaacgtaaggatttcgaggtttacagctgcgatgtctcgccagatgggaagcgactggtcacagctgctggaggtgagctcgaccctttttgctttgaggtggaggccacaaagatcatgcgccatagagagaattatcgctgacattcttttgattcgctctagatggatacgtgcgaatctggtcaacagaagctatttacggcaccggtacacccgaacttgagggcaagccaaaacaactggcgtccatgagcaaccactccggcacgattcataccgtgcgtttttcacacaacgggaaatacctagcgtcaggcgcagatgacaagattgtctgcgtgtacaccctcgacgctaaccctccaacacactcatcaacatttggtatgcttcggacacactggatacggagagacaaaagtagatactgacagctatggaaaactattaggcaccgatgaaccacctcccgttgagaactggcgcacgattcggcgattgatcggccacgacaatgatgtccaggatctcgggtggtctttcgactcatcgatactggtctccgttgggctggactcaaaagtcgtggtgtggtctggccactcattcgaaaagctgaagacgatagcgatccatcagagtcacgtcaaaggcatcactttcgatccggccaacaaatatttcgcaaccgctagcgatgaccggaccgttcgcattttccgattcacctccccttcccccaattcttcagctcacgatcatatgaacaacttcgtccttgagcagacaatcacagccccattcgccaattctccgttgacagcttatttccgtcgttgctcttggtcgcctgatgggatgcatattgcagctgctaatgctgtgaatggtcctgtgagctctgtggctattatcaaccgtggatcatgggatggtgatatcaatctgattggacacgaggcgcctgttgaggtttgtgcgttctctccacgactttatgcaactgagccgcccaataagaagcaagccgatgggcagcctgtacctcaacaccacattaccgtcattgcttgtgccggtggagacaaatctctcagtatctggattacgagtaatgcacgaccgattgtggttgcgcaggaaatggctgctaaagccatttcggacctggcatggtctcctgatggaaagtgtctctttgctactgctctggatggcacaattgtggcagtccggtttgaagatggcgagttgggctgggccacggcaatggaagagaatgagaaatcactcaccaagtttgggactaatcgaaagggcgctggaatcacagaaactactgacagcttgttgctggaggaaaagagcaaagctggcgagatcaagcacgtcgaagggagaatgggtgcactgatgggcgatggcgccgaacctacgattaatggagataaagccccacaagcatcaaatgggaccgcacctgctcggggctcttcgccagctcccgaggctacgaagacccagacgaatgggaccctttcgacacctgccgccacagaatcagagaagcctgacccttacaaagccaagttggaaagacttaagcagcgtccaacctacaccaaagagggcaaaaagcggatcgctccattactagtttccggagctggggctggcgagtcatctcttccacaagcccgtttgatggcgtctgtcagcaatcaggtcaaggctgatgccccgaccaccatcgttgacctgtcaaaacccttcgatggcttacccaagggtggcctgactgctcttcttattggaaacaagcgcaagctggcccagatagaaggcgacgaagatggcagcgtcgaaaagcgtgtgacacttgccagtcaaaacggtgcaactcccatcatggccaacactcccgacggccttctaccagctcaagttcaatctgccacgactggtcaacagccaactccagaattcattcgccccgcagtcacaaatccttgcatgtcggtcagccaacttcgtctggcagtccctaaaattcgcagccagattctccgcgcgttagattcgagtgggaaaccgacggaacaacctggccctagtacagactcgggctcttctaagagtcgggtggacgtggttttcgaagcccggaacccatcaccagcaagtctgaccggtcgtgccgtggaccgcgagccagtacgcctgacactgttccgcggagatcaaccattgtggcaggacttcttaccgcggtctgtcctacttgtgactggtaatcagagcatgtgggcagctggctgcgaggatggatcaatctatctttggacaccggcaggtcgtcgtctggtaagtgcgctcgttctcgaggcacagcctgtcatcttggagtgcaatggaccgtggatcctgtgcatttcctccgtgggcatgtgctatgtttggaatgtgaagcacttgtcgtctcctcacccaccagtctccctccaaccagtcctggatgctgcaattcatactatgggcgtgactcccaccgccgctcccgcagtaacagacgcacgcattaattcggagggtcgaatcattgtttctttgtctaacggcgaaggatactcctattccccatcaatgttcacatggcagcgcatctcagaagcctggtgggccgtcggcagtcagtactggaacaccacagacgcacccgtgagcaacttgcaggccaaggatgcacagcaagataacaaggatgcgaaggcagctgttgccgccggcattattccttggttggagcgaaacaccacgaatgagaccctccttcgcggaagagcatacttcctccagcgtctcatcaaggttttattgtcacgcgaaggttatgagactttcgagtccagcgtatcaattgctcatctcgagaaccgtcttgctgctgctctgtccctgggtgccaaggaagagttccggttatacctatccatgtacgctaagcgcatcggtgccgagggtctaaaactgaaggttgaggagctcctaaagggtctcatcggtggtctttttgaggatgaagacgaggacagtgaaggcgtcttgaaactgcaggacaaccagcgcgatggccgtaactggcgcgaaggatctgatgatctgtgtggctggccacgggagactttgttgaaggaggtgattctagcgcttggtatgtttctttcttttttctttgttctttcttctctttcttgacgattcaattactaacgaacgttcatctaggtaaacatcgtgaccttcaacgcgtgacagttccttacgccaagctgctggacatggttgacaatacctctgaacatggcgatgcaatggatctttaatgatgttttctctcttgctatctataccttttcttcttcttgctggcgttcaataagttcgggctgggtcaacccaaagggtttgcattattatctctgctgaggcgggattggagatgataaatctcattttcatggtgtatttgtatcataggttcacttttgggtcgttattatttaagccaacctgttcctatcttgccctagtttggtcttgctctaggatcaaccagacagaccctaatatccctcgatacacacagtattacgtacatgacacccacatggatgtagtgacgtcgtcagggcttgactctcacgtgggcggtagcagctctgcaggcagaaaatttgaagatatctggcgcgtacctcgtcaacattgcattttgatagctaaagacgcattcatttactctctttgtactcatagaccttgtccgcaattgctgtggacaaccgccatcacgtcttccaaaccatctatcttcttccttcgtatcgtcgatcgatccgcagctggtcctgcatttggcgcgttccattcttgttcccgcttccgcctttcaacttccccccacctcccacttctcttctgtcgcttctactcaagcaagaagaaaaaatccaataagatgcctcccaagaagcagcaagtccaggaaaaggtccttttgggccgtccaggaaacaacttgaagagcggtatcgtatgtgagctaggcccccacccattcttttttttttttcctttttccacacagcacagtccacttttacttccgaaaaactatttaaacccccttgtcccccttccctcccgccttttttttttcttttcctcaaccatgattgactaacaatatggcttcaggttggtcttgccaatgtcggcaagtcgacactcttccaatccatcaccaagtcctccctcggtaacccggccaattttccctatgccaccattgaccccgaggaggctcgtgtcatcgttcccgatgagcggttcgactggctctgccagcactacaagcccaagtcgcaggttcctgccaatttgactgtgtacgatattgccggtctcactcgcggtgcctcgactggagccggtctgggtaactctttcctgtcacacatccgcgctgtcgatgccatcttccaggtagttcgctgcttcgatgatgccgagattattcacgtcgagggtgacgtcgatccttgccgtgatctgaccatcatcaacgaggagctccgcatcaaggatatcgagtttgttgagaaggctcttgatcttcttggcaaacagactcgtcgtggtggacagtctctggagatgaagaagctcaaggaggaggaggctaccactgccaagatccttcaattcctgaaggatggcaatgatattcgcaagggtgactggacccccaaagaggtatgttggaatttttttcttcttcttttcccaaatcaacttgccctttcaactcctttcctgatgaataagagcactgctcgaaattaacccagctcgttgagtgccctcattaaaaggatactcacaatccgagggcaccttgagaaaaaaagttatatgctgaaattttggagtccacttctacatgattgaatcactcatactctttgtgaatcctcatgctaaccgaattggttataggtcgaagttatcaaccctctgttcctcctcactgctaagcctgttgtgtacctggtcaacctgagcgagagagattacatccgccagaagaacaagtacctccccaaggtcttcgagtggatcaaaaccaactctaccggcgacccaatccttcctgtctcggctcagttcgaggagcgtctgaccctgatgcacgatgatgcggccgctgaggctgagtgcaagactctgggcaccaagtccggtctgcccaagatcatcaccaccatgcgccagtccatgaacttaggcagcttcttcaccactggtgaggacgaggttcggcaatggaccatccgcaagggcatcaaggctcccgctgcggctggtgtcattcacacggacttcgagaagaccttcatccaggctattgtgtacaactacgcttctctccgtgagtacggtgatgagaatgcgatcaaggctgctggtaagattatgactaagggtaaggattacgtcgtcgaagacggcgatatcctgctcatcaaggctggtgctgctaagcactaggtgcacatagacaatagttcttcaaatgaaacaccagtgttgagtcttggcattttttccaactgtaaatttccttgctgttgcaaatcatcattggtaggtcaatgttgcagaatatacctcatttcccttctgtatgattcttgccttggtatttgaaggctaagcctacaatagctcacattcatagtgaaagatcatacattctattgtaagctgttcagcatgaagtcgaagcaaaaaatccgaagcacttaatttggtcacgtgaccgcctccccgcgcatcccacttcggtatcaagagcttgattcttatattatcaccacctcaacaagcatcatgtttaagaaagagtgagtcaaacgcttctcataaacccacgactagcccagtggattgtttggtgcctcttgtctacccaatgggagcacatatctctctctgtttgaagaccgggaaagactgcaggagctgtccaatgctccattcaagaccacacagcgcccatgggataaatcttgttcaaaaagattatcaaaaacaccagctaacatccgtgctccatctagtattcccccaagcaaccgatctaaggtgaagtcctcggtgcagcgcggcctgcgccagaagctgctggaaacatacccaggcctcgagcccttcattgaagatgtcatgcccaagaaggcctcattggaagccgtgaaactgtaaagttcccattcccgcgtcttttgtcttccgattccagcaacgtcatctctggctttcgacatgaacgtgctgcatcttttctagagacccaaaagctaaccacaaccaccgccatagacccgatcgcgtgaccctctacacgatagactcaacccccctcttcttccaacctatcgatggacccccagtcccacacctccgcctcatccacgcctacccctccgccatcccgacaatccagatcgaccgcggtgccatccgcttcgtgctttccggcgcaacgctcatggctccaggtctcacatcccccggaggccgtctacctgatgccgagcatgcgcttgaggccggacagatcgttggtgtcaaggctgaagggaaggaggagatttgtatggttggtatgctgaaggttggcactgaggagatcaagagtaaagggaagggagttgttattgatgagggccattatcttggcgatggactttggagaatgcatttagattaagggacatggttttcaaaagaagcaagggattcattgggctggggttgtggtcttttgggatgtttggcttggaactatacctttatacctctatacctctctgcacgcatggcgatgattatgtgttggatgatttgaaatgaaatatccccctggacaaggatccagattggttcaatggatgtattgattgaatgtagatagcttcttgtattgtcttaaaaggctttgtaatttatgtaggagaagcacaggtacatgattactggggtattcggaggttcttaggttgaaatatatattttgacgatggggctggttcgcagaaacttcccatttcccccttttcatcaatgtcttttgatccagtcgacacttatttcacaatgcattccaacagtggaaaatgccgattggagttcgctcatggtatgtggcatagctaatgccacaaagccgcaattcaagcagcccaacgacaatatgagattgaatcactggcaacacgactgacccatggctgatattgagcagaatgggcgacaaacgacgtctggaatcacgggtgcaattatctagaccagaaactgtctagtgaaggggatatgtcgaatgtcaacgaggatgtgatgtccgaatccgcgagcgagaccttggtgaaatccgagggcgacacatctggaaacggttccttcactggccagacctcccaggacgagctgactgaggacaaattgccccgaaagaagaaaagctcagtcaacaaagtctcgacacagcttgtgctagccatatatgtaagggagacgactgcaagcaacgcatctgaggatgaaattgaaacggcaaaacataccggccttaaatccaaatcacgtcgccggaagattgaaaaaccagagaaggagcaaaaagaacacaagaagcagatgaagcagaagaaagccgaaagcaagcagtacgaggaggagaagagtaccccagcgaggaagatgggaactagagaagaggaacctgaagaacgacagttcgaagagcacgaatccaaggagaaagccgaagagatgaagcttgcaaagaagcagaagaagcacagaaaactcgaggcgaagctgagggaagaatcatgccgaaaagattctgcggccctatcaagtcggaagcggaaggccgacaatgaagatgaagttaccacgacttcaactacggcaacagaagaaacagcataggacttggaggagtgatcagataggggccgagatatgctcaaggatgaagcatgtaattcattcacacagttcacacagtctaaatagggaaactggtcatgctccgtggagaataatgagcctcgatgctacgagtgcctctggtcgagctcaacggttacagttacacaaccggcgtctatgttgctttctttcctagacgataattgactcaaacttccaggataatctcccccgaatgtctctggctgtgaaaacaaatctcctcgggtctagtgatgccctcgagcagtgatgatgtattggacgaagagagtcgtataaaaggaccagagaaacaaaacccacatggatcacaaaagctgtcctcggtgatattccgaaggccatagctgattggtacatggatgttgggtgttctcgaggctcaaaatccgttagagggaatgtaatttgaatctcaaatgccccgaacacgtatagtgtgggagtgaagaagtagaaattttatctccagggctggaatatcaaataacgacaacaagcagagagctgggaaggctcgtggattatgattattataaatgaagtgaatatagccaaaaaaaaaaaaaaaaaatcaagctcatgcatgcatcaaccgattacatacctagtctacatcaatagatgaaacctcgaaaggccgaccaaccacctgcaaaaaagaaaaaaaaagaagaatcccatccattcattaccattcctccatgaataacccaattctcgaaacatagttctcaattctccagaccttgaagctgaagtcataccgagcgtcggcacataccaaagcccggcacataccaaagcccggcacataccaaagcccggcacataccaaagcccggcacatcagccgatcttcaagtggcaatttacaggagagcgaggacaccagccagaagaccagcggcggtagcgggggcaaccagacccatagcggcaccgctggaggcagagggagaggcagagctggtagaagtgccggtggtggtggaagtgctggtggtcagaccggtggtggtgccggtggtggtttcggtagtagagctgccggtagaggtgccggtggtggtgccagtagtagttccggtagaaattccggtagaagttccggtagctgtacgtacagaggtatcagtgctgtgcttgccaggggtggggggactagtagtaagggagccagaggtaagggttccggtgggggagggtttgatgatagacacgtccagggtggaagtaccagtagtggaagcctcggtttcagtggtggaggcaccagtggaagtggaagtagaggcagtagatgtagaagcagtggaagtggtaccagtggagacaacagaggtagaggcagtagaagaggaggagacagtggaagatgtaccggtagtagtagagctggaggagctctcggcggtcacattgaactgctcggactgagcgaggatgccggtgttcttggcctcagtggagagcaggttgatctggaaaccggaactgcagtgtacattaagtgttagtagacatacaatcgacgcgccacaaaggcgatcttacccattgctgacgtccttcagaccactggcagtgtaagagcccttggaggtgtcgatgccagaggcaatcttctcatcgacgggggggtagacggcattgttgacaaggacgatgtcaacagtggaggcgtcggtgctgtaattggttagttttggctgtcatggctagtgtaagatgtgagtgatcatagtcgacatacttgacggatgtccatttcacggtgaaagatttggacagatcgaggtcgtcgcccttggagggctcggtgacctggatagctagactgattattagagagagtctcgcgtcatatggtgatttacatacctccaacggaaagggccaaaggcaggagagacagaatggtggagaaacgcatcttgacttattaaagcgaatgtagtggattaaaaaaacgaatgaacgttggagtgtaaaagagcgagagagatgcgagagagaagttggaagatggaaaaatattcagattcaagggtccatgtcattaagtaggtgaccaaacatttcatttgatattgcacacaaccttggatgccctgaaccgtcaacaatgtctctggcacccactaccaatacggaaagatacctgaaaatagaactgacatggcgaggtacccggttttagagcatcccaaaaatattttaaacattttattatacacaacgtgggaattcagggtctcagtaaggttccatgtggaagtaagtagagcttcatggctcgccgaggagctagtttcaggcgcaaattccactttcgattttggggaatctgactccgtgttccgtactctattattcgatgggagttccatattataattgtgtatacttcgtatattgtatgtactccgtcgttattttttacacccggaggtggcccgtccactatggatcccagccatcggtgtggtccgccgatagggtcgataagaggacgctagacaggcttggcaatccgctagtggtatttggtacagtcttggcacagaaccgaacccgagcagtatgaaacggcgaattacgtatgtatggtatccgtatttttgaattgcaaattctgcggtaaattacagaaaggcaatctggaccctgaattttcatgtatcttttcactagctcgagcaagggtgttggccaccaatttgagggaagatcagcaaagcctaatcatccatggggtaaggggaatcaaaaggctgcccatgagtactcataaattcatatccaatatttactccgtacgatgtctcagaatgaactcgaaaatgctgcgaacacaccgtttcgatgtctcaacgaagacccactccacagaccaatttcaggattgagacatatctgaatttgggtctcggacgacacgctaaatgaaccataagtgggagcactggaggcgataaaatgagtgtctcagaacctgcaggcacgttattatctctttacggacagaatggtgccatttcccagtcaggtagcggtcaaatacggagtcagatccgaatcagtaaattcctttttctgagttatgatttgtcgaatacggaaggaagatacggagtacggagtgcagttcccaagtgttatcccaaatattagatgttgtacataattttcgcaccggagaatccccggggatgcgccttgcgcccaacaaaagattaggtatcgtagatatccacgttactggtagtacggagttagtaatcaagccacaatcagtgctctgtacggtgtactcggctgggaaagtatacatacaagtccctcttgagaccatcccggtccatggtagccgaatcgacccagacgctagcactcatcgcctggacaccgaagtctccataccccttcttgttgataatgacaggtttcatgctaggatgcaacaggtcggtccattgctcatatgcatgttgctgaccgacaaacatgcgctgcacacctggaccagcgttgctgataacacatgcgagtccggataggtgacgggcgtttccgtagcgaacgaatcctgtttcgcagtcagatctgctagtgtggatacgtgttccccatagtggggcgcagtaatccaggggtgaaagggccaagcgaacctatgcagttgggttggttgaaataatcctgctgttcgccgtaggcatagagtttccgggcttgagttaggacgggaagatgaccgttgcaacttggtgtcattgggctatccacattcgcccgtatcccgtacaggtcaccatagaatacgcatgggtgaccgtctttgcggaggaggaccagtgcgtatgctagtaatttaaaggagtgcgccactggggtctgggctttgattagccgtgctcgggccttataaaactgggaagaagttgactcacctccagcatttgtcctggttgctgctgagagttaggtaaagaagtaaatatgccaagatcagacacagttggtacttaccgtatcgtgattcgaaacaagggtctggggaagttagctttgtatcattactcgagcgtcgaggaactcaccacagcgtggtccggccgacactgtaccaatgtatctttgaaaatcccgcgaagatctggtgccttggcatgggacaacttggagaaccgctccaggagaggtacatcatatgcagcgagatcatactctaccttctcgaggtaatgcagaagggacggtaaatgtccagtccagtactctccgatggcgaaaaagtccgggttggcggttttccgaacatattgcacgaatgcgcgttggaactcggttgagaaatgcttagcggcatcaagtcgcattccattgaggcttagggatttggtgatccacgttccccattgcaggaggtctgcgcggacttctgggtgtgtcaggtccaaatcggcgaacatcaggtaatcgtagtttccattctccgtggacacatcttgcgcccagtccttgttggatgcgacaatcttgtagattgcgttttgcttgctcttatcgtcccagtcaacgccgctgaaatgttgccagtgatacttcattgagctgtacatgtcaccgcgaccggcgaaatcaaagcctgtccagccatggacttctgtcggcttagatatatccagatctcttcctgttgttttattttaatcagcgaaaatccatgattgaatatcaacgaagagaaggataaaatcgctcacgtttaggatctaccttgacagcctgaaaaggctctggatagtccgcgccagctttatgattgagcacagcatcccagattacaccaatgcccaagttctgcgcttggcacatcaggtcttcaagttcacgcttggtgccccatttcgtgggaactgcgcccttctgatcgaactcccctaggtcgtacagatcatagatgtcatagccattaccattcacatccattcccttgcatccgggagggatccaaatctgatcaacgccgatggctttgtactctggtaaggcattctgcagacgacgccagtgctgccggtcggcgggaacatgccattcaaaggcttgcagtataagcgaattatctggagcattccatgatgggagctgttgtagattcgctgctgcttctgtaccgtgtatgcaggttagagcttcgaactgttttccggtcggggatactgaccttcaatctgtttccatttctggcctttctgtcgagatccacaccacaggaaagacggcattgcgggataccaaatggcaagtcaagcagtcaagctatgtcaatgtccagctaaatagtagttaactagaatatgcatatcctcccttttagggcttggatgtggggcgactatatttgacttcgaactgttgtaaggtacaggttttgcagttggaggtgtctccatttattattctcaaattattaaaaatgtctcagacgaaaatttcacccaaaggaaaattggaacttttctagaagaaaactccacctgagataatctcattggctaccgccggccataaatgcgtgacatgtaagataatagtaaataggaaaaaaagcccataatcatataaaggccaaagggcgtgtcaggagggaaaagaccaaaaatatcgccaaataaaacaagaggtcaaaaatatggcacaagaaaggatatctccgcgaaccaagctgagtcgtggctcaatggggggaaaaagggtaaaaatagaaaatgaagaccggaagatcggaagaagaatgaagcgaatgaagagagaaggaaaaaagaagggctgtcgaggaatttcaaacgagcatgacgaacatgctggtcatcacggctagcagtaaggcggctacaccggtaccactggtaaattgcattccagccgacgtcgaactactgccagtctccaacatcgcgagggtaacgttcgtctcggagtagccacaaagaccactaccctccatatattgcgtggggaagaaaacccgtggctctcccttgttcatatcgacacgcagcaggccctggttgtcgacagtatagttcttacagttcagaacatccatgatcaccgtgccagcattgtaagtaactgccatgtcgaggttgtaagccccactggtcgagggttgagtggacaacaccatgactacttgtcgaccctggacaccctttgtgaaaccgagctcactggctccctggtagatcgtgtgggtcgagtcctcaaagtagtttgtgcccagtaaggctgcgtggttccgaatgcgattcagtttcgcgatcagctggtagagcaccgcattggtgtcgtatttggtgagccagatggcttctcggttgacaggcaccgagttccccttcaggtgttgctcttgaccttgatatatcatcgggattccatcaaatagcatggtaaacactaagacatttttggccatctgccaagtactatcattaacaaaagcgaccagtcaacccgaggagggcacacataccgctatgtcatcggagtagctaccaattcgaggtttgtcgtgattttcggaaaaagtggccatagcattgacatctggcatggtgattctcatgttctccactgctttcgccaattgagacgtattgccctgggtaaacgcatctatgatttcgaaatagatcggataatttggcaaactgtcgatgtagttgctctgataatcttccatgatgctgactgccccttcaagaacttcacctgtcatgaaagtgtcgacaccattggaaaaattttgtaggaaacccgtattaacgtgcttggcagcgtcaatgcggagtccgtcaatggaataggtcttgatggcgttgtttgcccatgcgatcagaagctgttggacatctgcatgctcggtgaaaaggtctggcagcggcacgtctagatcacctgtctgacacctttgcgcgtcggtcatgttctcccagtttttgattttgcagtagggatggaaatagtctgcgttattgaagggtgtaaatactgagtagtcgatatgtgtggccgggttgctgccatttgtgatgtacgccatgttgttgattaccgtatccatcatgaagtacatgccccgggagtggagagcagcactgaggtcgagcaagtcttgatgcgtcccaaaatgagagttgagggtgttgaagttcaatggccagtacccatggtaggcttcgccataggagacttggccatggatattctcgatgatgggagatatcatcacagcgtcaaatcccatcccttggatgtagtccagacgatcaatggttcctcgccatgttcctccgcaataaaagcccgcggtggtattgcatggtgctgttaatgatccatctgtgcgagcgaaacgatccgtcatggtctgatatatcgatctgggcttccagtcgactgtccttgcggctgatgccgaggaaatgaggcccgtgatcaagagccctaccagacggccaagggtcgatcgtgacatcatggcagctcgtatttgtgtgatgggtcgaccggaagaggcgaaaaagagagtactgggctttcagataaagagtgtcttgattaactcacgagagggcaaagatggccggcaagtggaataaatgagtgacatttggactttatccaggaacaggaaacgaaaggaggcaaagaaagcagaagttggtccctagacaggaaaagatcggggaaaatggctagtcaggtggcacggcttttcaaggttctgttgtccatccatacatgtcttggaaccttccccccacaaccacgcgttatattattatccggccagttgcctcgggatatctgcaccaatggacctgattgccatgcgacctacccgttgatatgccccgggattcagaaataaaggtatgattctagtggcttactttaagaaggactaactacacatcaagcgggggctgcagaaatcaattttagtttcattatggtgtaattgtgggaggggaagaagcgaaagcgacttagcacactagtaacgacactattggaacaaggagtacagagtacaggagctgtcaggtaccaggcaccttgctggaggttactgttgattggtcgttatcacgtggagacactgccctaatctcaggaacggtcatcaccctatctatcacaagagaagtgacgaacttttgacggtccaatcatccgagacaaagtgccatcaatctaagagactagcgacgttactttgaatttccacaaatcgggtccaagctatagatagtactttggtacttcgtaccgtaccgtatagattacagcgtatatacgccgtatggagtaccccgtaccttgaattgatacaccaaacgctttggccttggccctgggcagttgaatacgagatatggcgatacaaaagtttgaatgaacaccttggcaaaattttacgattctatacgaattttaacttgcaccagacacccagatactacaatgaatatatacctcgaacaacgcaagaaagaaaaaagggataaagatgtgggaaatgaacagagataggtgtaatccggtgtgatagataagtgaactcgggtggctgtacgagatttgctgcgccattctcggcttcccggacttccgtctggagtggcgttgataccagtatcacatcacggtaaatactccgtactgcagggatgtctgaccttgtggagattaagtcagatatttcttttgcttgttttcttgtacggagaatacttccaagttttgacttaaataagatgcatagtggacatgttagttcttggttcctggtttcatggaagttatccgtcttggcattattccttgtttaccattggttgctattgtaaaccttggaggaatatttagatttgtaccatggttgagcccccgggaaaccgaaaagaagaagaaaaaaacccttgagaaaggggaaggacgaaaaaaacgaaaaagacggagaaaacgaaaaacgaaaaacaagtgccgtacaccatctggtataagcccccggtcgtaaaagcaccaagtgggggtgggtcttacctcaacgaccaatcggccgggtcgggctatcatgatctcggccccctaacccacgcgggtcatgaccgagaggtatatcggcattttgataggctgataattgcgggcctagaaaatcagcagtcggcagacgtgaaagttgcccactacctagccccgtcaggctccaattaatactcttttaaccgaactaggtgtcctattcggcttttgatgccaaggacaggcgggaaagaagaataaaacaatcataatttatatccaaaggagaaaaagatttaaaattacaattacaattacatctaattaaaccgaaaaaggcaaaagaaataaaaattaccgaagctgagacgttggaacccaatatactccaatacagtctggggctctaaaattgatatggagtttgtctcatctgcttttatttttatcttgagcttcattgcgactaggcttttagcttagcatttagcactgcgcactgctgttatgtgatcatttctttttcacttccacaatcgattcttccttcgtttacatccctcatctctcgtccatcgtccatcgtccctcgttcgctcgttctccttccctcgttccttcgttcgctcgtttgctagtccgcctgtcgttatcttctttggcttactgccacctttgacgccttctgttgggaatttgtgacgtgacctttgagatacatacctacatcccactgctctatggcaattgagagctgcacatcttcatctctttcatagagtgtctcatcctctcatcccagcggggatatccgcactatctgaggcgcgcgaccatcactcaacagcttcgcgcagtcaccagtcatgaagtggctactcaccagcggattggtctcgcttcttgcgaaaaccgtcacagcttggccatacgacgaggcctacctagattataacctcaatgagaataagacggccaccaacccagcagattactggggaacatggcctggccatgaggggaaatatcacccctctccaacaaattggcgcttcccgttctactctctcttcttggatcgcttcgtgaatggtgatcctaccaatgacaacgcaaacggtaccacgtttgagcatgatattgaacaacgcatccgccatggtggcgatgtggctggcctcgtcgaaacattggattatctccaaggaatggggatcaaggtttgtctcatctgtgatcttctagtggcaagaaaatatatgctcacaatgttcagggtctctatattgccggaacctccttgctgaatcagccgtggacttcagacggatatggagttttggatacaacgattctcgacgcgcattatggaactatccagacttggagagacgccatcaccgaaatacacaagcgcgggatgtatgtcttgttcgacaatactattgcgacgtaagttgtccccgtgtgcataaacaagagaccagtgctaactgaatatatccagaatgggtgacttgattggatttgaaggccatctaaacacatctactccattctcggagaaggaatatagaacacaatggaagactgaacgccaatacagagacttcaccattggagctggcgactacaatcagacctgtgactaccctcgattctggttcgaagatggataccccgtgaacgaatcagagacctcaggcttggttggatgttacaacagcgacttcgatcagtacggcgatattgaggctttcggtgtgtggcctgattggaagcgacaactggccaagttcgcctccgtccaggatcgtctccgcgagtggaacccgactgtgcgcgaaaggttgatccggcactcctgcatgatcattcaatctttagatattgatggtttccgttatgacaagggcacacaagctaccgtggatgctcttggagacatgtccgctgcctaccgagaatgtgcgcgcgcagttggaaaagagaacttctttatcactggcgaaatcacaggtggaaacgactttggtgccatttacctcggaaggggtaggcagcgtaaccagtggcctgagagctctgccgaaacaataaagttgacaaatgagtcctctgcccagtggttcttacgcgaagcgggacatgaagccatcgatagtgcagccttccactatacgacatatcgtgccctgactcgattccttggcatggatgggcagctttcagccggttatgatgcgcccgatgactgggttttgggctgggactggatggtgcaatcaaatgatttggtcaatgctaacaccggcaagttcgaccctcgacacatgtttggtgtgacgaatcaagacgtcttccgttggccatcgattgccaatggtacacatcggcagttgctcggttctttcgtgactacattgatgctccccggaatcccacttcttctttggggcgaagagcagaacttctatatcttagatgccactgcggagaattacatctatgggcgacaggcaatgtcgcctgcaaccgcgtggagaactcatggctgctttaacctgcagtcctcgcagtactacaagtggcctgttctggcagctaaaaagggctgtgaggatgtgacagttgcctacgaccaccgcgacccttcccaccctcttcgaaatatcatgaagcagatgtatcacttgcgtgaacagtacccaattctcaatgacgggttttacattgggaatttgtcaaagaaaaccgactacgtttactaccctggttccaatggaacggccacggagaccggaatgtggtccatttaccgggatatcaataccaatgcgcaaaaatacgaatccaaatatcaaccggtctggcttgtttaccaaaacctcaatgacacaaggacatacacattcgactgcaactccgacaatgtgactaagacactgactgctccattcgattctggtaccactgtcaagaaccttttctacccgtacgacgagatcaaactggtggatggagtgcgcaaactcggcttgaatgggtccacggagttgaatggctgtgcggaaagcttgaaaatgaaggcatacgagttccgtgcatacgttcctatcgctaaacatcaataccctcggcccatgatcaccaaattcacccccggccatgatttcccactgcgttctactgtggcgcccaaccttccagagaatgtgacggttgagctttacttctcggaagaaatgaactgtacctcggtgaccggggcaattaccatcgattcatctacagagactgggaaggttccaaccctagattccgatactgtgaagtgcacaactatctctcccttgctccaaacaaattggactgctgagatcccaagcgtttggaagtggacagcaaacctcactggagtgtacaacggaatccataaattgactgtcaccaatgttaccaacaaagacacaagctcttatacctacgctgttgatcacttcctcttccgtgtcggccagttcgataaccctatggtgttcacttccgccaactactcgagcagtctactccacaagaaggacaacggcgacctctttatccagcatcatgctgctggtgcagacaaataccgttattcaactaattgggcatcgtcattctccaactggaaagaatataaaggcggaaatgataccatcgagaggctcccatggtcaggaaccaagaaacaagaatgggacggtgagcatgtgcgtgttgagtactggagtcgtttgactggaagtagcgactacgtgcagcaaggtgacgctgactgggaccacccagtcacacgacgtttcccccatgccttcttcaatggaccctacaaccagtatggattcgacgggggccttgacaacagaatcacactcgacaccaaaaccggagtctggtcctaccatttcacgtccgaatggcctgcagtcggtcagctaaatatctggggaattaacccagacggaaagcccgatcaaacctgggttttgggtgatatcgacaatgacacagtcctagaccgaagcccaccgtctgctctgagcgcgactttgatcaatatcaccgccgcgccagcgaaaggctacctctctcacaaaatctacttcgacgatggaactctccatttctggctcgatccggttggacctcagtccacacagattgccatgttcgtgttattctggatcataccattcctcactgccgtgggatgtgtgtacatcttcatgaagtctttctataaggtcaaattcaaccaggtcggtgtgagtgagaagcaaaacattccgctcgcaatttggaacaagatcaagacgtccagtggtcacagggatcaatcctcaaacccactaatgcgcttagccaacaaatccggcttcatgcaaagcaccaccgctctgggcggagctcttgcttctggcaagcgacgcatggttctaatcgccaccatggagtacgacattgaggattgggccatcaaaatcaaaatcggtggtcttggtgttatggctcaactaatgggtaagaccctaggtcaccaagatctcatctgggtcgttccttgcgttggaggtgtcgactaccctgtggaccaagaggcagagcctatggaagttaccattctcggcagcccctaccaggtccaagtccaataccacgtcttgaataacatcacctacgtcctgcttgatgctccagtgttccgtcaacagtcaaagtccgaaccctaccctgctcgtatggatgatcttgacagtgcagtgtactattcagcatggaaccagtgtatcgcggaagccatcaagcgattcccgattgatacctaccatattaacgactaccacggttctctcgcacctctttacttgctcccaagaactatccctgtttgtctctccttgcacaatgctgagttccagggtctctggcctatgcgaactctcaaggaaagagaggaggtttgctcggtctttaaccttaacgaagaggtcgctcgtcgttacgtgcaatttggtgaagtgttcaacttactccacgctggcgcaagctatcttcgtgttcaccagtcaggatttggtgccgtcggtgtttctaagaagtatggtaaacggtcctatgctcgctatcctatcttctgggggttgcataagatcggcaatctgcctaaccctgatccatctgacgtcggtgagtggacaaaagagccaaccaaagagcaagatatcaccgttgatgcaacatacgaggctggccgtggtgagctcaagaggcaggcccaggaatgggcaggactcgatcagaatcctgatgccgatctacttgtctttgttggtcgctggtctatgcaaaaaggtgttgatctcattgcggacgcaatgcccgctgttatcgaagcccggcctaacgtgcagctgatctgtattggccccgttatcgatctctacggtaaattcgctgctcttaagcttgaccacatgatgaaagtctatcccggacgagtcttctcaaagcctgaattcactgcacttccgccattcatcttctctggggctgagttcgccttgatcccatctcgtgacgagcccttcggtctggttgccgtcgagtttggccgaaaaggtgcattgggtatcggagctcgtgtcggtggtcttggccaaatgccaggctggtggtacaatgtggaatcaatctcaacgtcacatcttcttatgcaattcaagcttgcaattgaggctgccctcaattccaagacatccgtccgtgcaatgatgcgtgcgagatctgcaaaacagcgtttccctgttgctcaatgggttgaagatcttgagatcctgcaatctactgctatcgcggtccacaacaaagtggcgaagggtaataacaacaacaatcgacctggcacttcttctggagtcagcactttcagtggagccctgtcaccttcaccttctatgactcaactcggaagcccacttgcttcacccggcctgaactctccatacacgcattctagggacagcagctattccttcaaccaaatgaacaaccttgcccctcaaaagaaggtcagctacagcgcagatacaaacctggacgacatggagaaaccaaagtcgggactgagccgttctctttccctgggtgttcactcaggtcctggtcatgctggacgtcgcagagcagcaaaagaggctggtatctcagaaagcgatgaaaacggagccactgatgccgaaggcgaggatagcagcgacgaagacactgcccgcaccgtgtttggcgatgacgaatacactctcactccggctcaagtcgaggcagggcgacgagcccaggctgctcaaagagaccgtcctcaaaacctgccttctccaagccaggagtctttacatcccaggttcatgcttcctttggaaagcccgggatctccgggcacaccaccgagcgcggacagcctccttcttcctccccagccatttggccagtccaatcgtttcagcagcgcatccgttctctctctggactctgttgtcggcaacaagacagacttcaagctacagaaggttgatcctttcttcacagatagcactggcgagtactacaggacgtttgataaaaagttggatgccctgaacggatctaactccgagtcgcaactttgtatcgaagagttcttggtcaagagcgagcaacagtggttcgacaggttccgcaatgccagactgggtcgtaccaaatctcccacaccatcgattcgacactcatcaaggaacactgataccccagacaatatgttctacagtgacgatctcgtctccaacattaatagcaacgaagaaaatcatctccaggatgatgagttccttctcggaaaggactatgtccctcccagtggacttaagaaatggatgcagatcaaaattggagactggccggtctactccattttcctcgctctaggccagatcatcgccgcaaactcataccaaatcactctactcaccggtgaagttggccagaccgcggataagttgtatggaattgcaacgacatatgccattgcatccatgtgctggtggctcgtgtaccgctacttcaagtctgtcgtttgtctttctactccgtggttcctatatgcttttgcattcctcctgattggatctgctcactggcaagatgattccttcagtcggggatggatccagaatgtcggtaccggtttctacgccgcggcctccgctagtggatctatcttcttcgcttcaaactttggtgatgagggaggtgctccagttgaaacctggattttccgcgcctgtgtcattcaaggtattcagcaggcatacgttattgccctctggtactggggttcgacaatgaccaaggcttcttcagagggtctcttgagcgctgagtcaggcattgccaatagctggaaaatgaggtgaatagccccgtacactgatctccttccttactttactaacattactccagtgcgatttgttatcctatcactgtcttcctgtgtttcgtaggcattctgttggctttgggacttcccaactactaccgacagaagcctggcaaggtgccgtccttctacaagtcccttttccggagaaagatcgtcgcttggaacttcgtcgcggtcatcctgcagaacttcttcctgagcgcaccatacggtcgaaactggagttgtaagttcaatcttcccaatcgaactctggcataccgatcagtactaacattcctctctcccagtcctatggggttcctcgcacgcccacgcatggcagatcgtcatcctctgcatcgtcttcttcggcgttatctggtgtatattcctcttcgtcgttagcaaattctccaaacgacacagttggttccttcccgttttcgcctgcggcctgggcgcaccccgcttcatccaaatctggtgggccatctcgggcatcgggtactatctcccctgggctgggagttatacttccggcgcgctggtctctcgcagtctctggctatggctcggcgtgttggattctatccaaggtcttggattcggtatcatcctcctacagactctcactcgagtccacatgtgtttcgctctcattgcatctcaggtgctgggttccattgcgactatctgcgcccgagctttcggaccgaacagcgtaggccccggtccaatttctcctgacatgactaagggcgcccattccttggctaatggctggttttgggttgctttgttctgtcagttgttgatctggtatgttgctccttgcttgtctcgttcagcggaattatttctaacatttatctgcagtgctgggttcttgctgttcttccgcaaggaacaactcgccaaaccataagctcccttcatttttttggagcatttctgtttcttgtcatacaccggctacgcccatcacgatgaacatgaatgatcaaattaatctcttctgcataattgaagcatgttgtccccttgtgatctattttctttttctttttagatatcttaatgttaatattattgtactgagttcatactcagttagaatacatcaagtcctcgtagtgaaatgacgtaaagtcgtatataggtgtctaacaatgctgctttttctttatcctagtcaatgacatgaattctctcaaagagcacaagaccatccaaggctcaaattgctcgactgaatcagtccttgttttattgggcttccctaattaatggggtagtttgatgaagcttcagattcgtctttatacagttcaatttggaaataagcaacgtagtctctatactatttcgtgagcacaatgctgtcttctcctgacttacaggctcaacccccctttccaaagtccgagaaagctcttccaatgagcattattgttagccgatccctgccatactggaccatgagagttgtcgacccgagatgtcagttccatcaccaatcagcggtatacttacccgacctcacattccccactaagaccagactcgcatcttgactcttagacgcagctcaatggaattagtggatagttccgggccaatcaactccaaccccagatccggggtcagagaacagtgcggggttgagggctgttcagctcccgtgaccagtcctgatattggtattaatatcgtagaccatgtaggagactgagcccatttcattcaaaacctatcctggaattaataagcttgttgatccgaacgcattgaattcataatgtccaaaactcgagacacagagaaggacattgatggaggttgtatccatttggagtattcagatgatggaattgcacatccaaccaaggaagaatatgcacggtaaaccaacttcccagtttatcggcgaatttgttgctgaaacctccaagagtatataggaaaatcgacaggcggatcctgccgtttgtggcgttgacctatttgttatgctacctcgatcggactaatatcggtgagaaggcgaatgcttccattggaatcgttcaacagtactcttacttatgactatacaaaggaaatgcacgagtcttgaacagtggcaccggcgacgatctgatgacctctattgacatgaacgaccacgaatatcgcattgcccttatgctatttttggtggcttattctctatttgaggcaccaagcaacttagcaatgaagaaattcactcctccggtgtgagacttcgcaccctgacggtcagatgggtatattttttgctttactgacactcatgactagctggctggcatttcttgtcatttgtttcggcgccctgtgtgcaggaattggagggtcaaaaaatgcttcaacactcatggctctccgatttcttttaggtgcatccgaggctggtgtttacccgggaatgatcttttttctcagcttctggtacggaccgcgtgaacgagccatccgaatcgctgtctttctttgcagtgccacgctagcaggtgctttcgggggtatgatcattccgaacgcgatatgtcaatttatggatgctaaaacttgtttttataggtgctattgcctacggagtagctcatatgaatggtgccggaggcttacaagcatggcggtggctttttattatcgaaggtttaccatgtctcgtcctagcagttgccattttctttttcctgccaagctacccggaaaaggccaattggctcactgcggaagataaggccatcctcaaagcatcctttggaaataatgtggctcgagggtacatcacaaatctacccacaacaataactaccgaagctaatctgattctttctacagtgaggacaagctcaactgggctgatgcaaaggcgactctcaaggatcttcgcctctgggttcactatgtcctttatctttttgtcggaataggtgtttcgtccctctcattatttgctccggcaatcgttcagggaattggatacactggactccaggcgcagctcttcaccatcccaccttacgcatgcgcatatgttgtggctctcacagcggcatatatatccgatagagttgtatgccgagggttgattgctgccctgttcgggtttataggatttgttacgtttctcattcccggtgagttgtactcccattctcatactggtcattgatttctgattctcaatatagcctgcgtcccgagcccatcacttcatcttcgttacggtatgcttgtgcttagtgcatgctctgctttcgggtcgctacccccactatgtgcgtgggtttcggacaatgtccacagcactactgcggcatcggtagcaagcgggttgaatattgcatttactggaccaggccaaattataggggtgtggatctaccagagtcagcaggctcctcagtaccagacgggccatgctgtcaatgccgccagtcagttcatggcaatggtgttggcactgggcctatggatctattaccgacgacagaatgcaaagcttgctccgggtgagcagaagtgggttgcataaggtgaaattgagtgactgccagtccaagaggattacgtactgatgtcggaagatgttctactcgacagcagatcactataagagatcattacgctcgaagagcaacatggacatgagcaagtaaacaaaattatatatggagaaaatgaatatcccaaattgtgatcggtagttcagctgttgtgtcagaaaaagagagcggattgtttttctattgggcttgctattctaatgtcgatatatatctcaattgaagaatgtttatttttactacggagtaataaaccaacgaaaaatgtatattcaaatagatcagtggtaaccagtgccattctcaaacgaacaaaaacaaaaaagaagtcagactatcgaagctttaccgtaagaaatcgagcgtttaccttgttgatagttttcgaaagtcaaattcttataagacatcgttctatgtagctatatagacagtgctcgggcaaatttcgcggacatattagattattcatgtgtaaagcgagacaagttttcaatatgcaagttaaacatagttagatatctaaggctatcgaatgagtatcaaacatcaaaattttccagggagtctcattgcaccatcaagtctcagacagcatccattgagcatccggttcctaaatatctccaaaacaaacccgccgaactcttccggtttccccgctcgctttggccattcaaagtggtcctcgatagcctttcgtgctctttccggcatctttccttgagcggtcatcggagtagagaacatgtttggcgcaatagatacagctcggatgccgtatcgggataggtccctcgccaatggcaatgtcagagaccgtatggctcccttggtagccgcgtaagccacctggccttgctgcccatcgtacgctgcagccgaagataccataacaatcacacctctttcggactcatcgtcgggatcgatcgactcgggtagttgagccatgtgaggaacgacttgtcggatgaggtcgagagacccgacaaggttcacgttaatggcttgttgtaacttcgcaagttccagaggctcgaaggaggaattcataatctacatcgctttaacaccggaatcctaaatccgtgtatagaatcttggtccacgcacttttcctggagctaggatgcccgcacaacaaactaccccaccaatcggagctttcgtattctgactccactcaatggcatcactcactcccttggtgatgtctgtagtgcatgatatgtcgaccgggtagaacctcactagctcggatggaagatcttcttctgcggcgtcaataggttcagccaggtcaaacaaagcaacgcgcgcgccactatgagccaaagcctgtgctgtcgcccggcctaagccggaagatctatattcaaagtatgtcagctgggtggtgctgacgggtaaatcttgtgtcctaccccccggtgacaatgaaggtcctattttcaagctgcattttgctcgaatgctctttttgaatgtgtagtaggcctacactagttgcattgaaatccacttttataagtaatttctggtatctactcggggacctctgcctggaataaaatattacgccaagagaggtcgggtgtcgggtaattctttcggaaagtagactttcgccctcgaatggaaaatagagatggggaatgagcttgtagtcgtaatagctaaataatggggaacataaagccgaacaggtcgagggaaatgtatcgcacgtcgacccgagcattctttgctctttgttggtctgttacttcttgtagtaggcgcgcagctttaccagcatgaatgctcgcatgctcgccccctggtccatagtcggatttcaccagactcaattggcgaagcttagcaatacaccaggcaactttgaccgagtcggcgcattcggtcgcaaatgtgaacagagcccacattgctgcgctgttgagaggcgactcatcccaatcatcaatgtcagatacgaagttttcggaaatcacaattggctggtcgacactaccacgaagttctgcccatgtattatcggctgctgatctttcatctccttgtgctaaatggtcccaccatgcagctctgtataaataacaaaaattagaccaaaagcatgcccgaatcacgcagagtaatcgagaaatatctttcgcaagatgtagttgtaatgagtctttgagttgctcgaaatcggagttcaaaattacagggcggctattccaaagctggtgaagatcgttgataatctgactggcgctggcagtgacttccacttcatcttcgatggacccacgaggccgacggtggcgatccaacatagcaattttgcgaaggaactgctgtgacagacgatggaaagtgaaggcatcacgaagaatgctttcctttaatgtcggcagtgggctattggaagggcacgacgtcaacgggtctcgccgccttatctctggtcgtaaccggtcgggcggtggggataaaaggtccatttcccttgaactttgctgcaatggtgaccccgcatccgcgactgggtgcatcgacgggtttggagggccgcttatgaaaggtgatactgaggttggccgacgtgtcaaaatgccgtttcctccgaatatgacaagtttcatatcgcaaagaactagccaattcaatatttgctgtgttaacaaatcggcctcatctagatcttgtataagacaatctgcccattttatttgatgggctcgatgaatatcctccttgtcgatgagctactccatttgggtcagccaatgttcgtcaccgacgacagatgactaacctcgaagcaagtgagaagaaagagtccaattagcagctctcgacgaagagatgcagacggcttcacctttagctgctcgagcccctcgataagcgactctctggcaaatatatacagataatgagagaggttttcgccgtttcgtagagcatgtggacctttgttgtgttctgtagttgagaaaaacttgttaaagtggagctgggagagcgccacgattgcgtttgagatagtagagctgccacgggccatagccagaatctgacaacagagatcgtgccatgaggtagtatccacacttgatacagcaggaacaaacacatgctcttggaagtatcttcccaatgcatcggaacgacgagtgatgctttcatccgctccagggtcggtagttgaacgcgccgcaaagaagatattcgtggccatccggttgaaatttggaactatatctcgcaaaagattggcatctttgctagacgagttggaggtgggggcggattggtgggcattgctttcttgctcctgaagagcctcagttaccgaaggctcggtttctttggggagatggtagcgaacattctctgcggtgtgcttaattttcatattagcggaagagtcagcgatagaatctttaccgggcctcatacaggcacgtcataggttgagtttgtaacgaaaggggcagcgccatcatgacggtcatgctccaatgtgatggcatcctccaacgtcggaattgccaggccttgtggctccggtagcaaggtcgatggggaacaccataaatccagagcattccgagagaaggcgtcaaagtcaaagaacaaagcagtttctgggtaaaaggcagggttgaggctcgagtcaagatccatcaactcgtcaacgtctcggtgattggttgaagtcggtgactgatccacattctgctgactgggatgtgtgccagggctagttggtctctctgtctgccaacgcttcgatggaacccgtcgatacacacattcagctcctagtcgggtacagttggcacataccggagttccttcatcgcatctcaccttgcgcctcttgcaggtggtacagccggctcgtgatcgaggccccgatcgacccaggcgtctttctggtcggaagtcggtagatgcagttgcaggggacatttcagattgggaatgagaaatacccgaaagaatcagtttctcttatatggaagacatgagcattgccgaggtcttcgcccccacgtccttttgatgctcatcagagccaaaacgcggggttaatgagcgtcacctgatctgcagtctgcttacaacaaagacttggtctgcaactagttacagtgttctggcgaaaagaaattatcaaattatctcacaatctaacttcacgtggatttcccagagcttcgaatgtgtcggcagcccaattactaaatgcctttcgagatttcacggcctcgatatcctgcttgtttactccccttgcctccagagctgggttatatccgagacgtcgtcgtccgtcaacctgatcctggatttcagacgacaagggtgcaactttgtcatcggcacgacctaaaacagtgacaactgtagcacccccgaggcccatgttgtgctgcaggcagtatttggtctgcggtacacaacggtttgatgcccagccacgtagatgccatactaaatctacattagcataatcccctatataaatgggttgaattgaaggtacctaactcggccgtttgagcaaggcctgtcgctcccagcggatgacccttggaaatcaatccgccactgggattgatgatccatcctggagacgttcttttcgttttagaactttgatcatacgtgatgcctccaccggcgaccagcttccacccttcgccgtgtggagctaggcccaagtcttcgatcgcacacatctcgtttgtcgtaaagcaatcatgcagctcaatcacttggatatctttgggtgatagtgaagcctgcttgaaggcattctgagcagcacgtcttgtcatattggacccaatcagctcgatggcgctcgcgggctcatacaaatcccgagagtcagttgcaagggcttggcccctaatggcaattgcgcttcccttcaggtagggatgagcttgcaggaaacgctccgacactaggaccgtggcggcagctccggtctatcatattagtacacactggtgtatgcaggcggggtttgataagaatatgtacttaccgaggatggacagcattgtagccgagtaatcgatcccgacacctgtggactcgatgaaacttccttggtcgtcacagactgacgcagctgactgtatggattgttcatgccatgcgtacggttagtggaggcaatagcggcgaaatgctctgcttttgctccgttcgacccgtatttttccaggtactcagcttgggcgttggcatatagctgaggtgtccagccagctgattctgcttgaccttcgggaataaaacgcttcgaaagagccagaattcttcccaggggattctccctatccttataaatctgtggaagagcaccaggatacattttgtcaaatcccaccacaaggacacaatcagcactgccggcctgaataaactgattggccatatacaggcccgtactccctgcgctgcagtagttatgaacattgtaaatgggaactccagtcatccccagggtgtagaaaacacgctgtgcgccagcagagtcaccaaacacataacacccaactccctgatcaacatcatcatagttgattccggcatcgagtaaagctttcacacatgcggatacggcgaggttgaaataatctccctcgggattggaggaggttgcagctgattttttgggagactgaaatggggtcatccccacaccgacgatgtatactggggaggcagtcatattgattgatgtacaggaaaatgagaaggagtgcacaaattatatcgcaatatgtagattagcgagcttctcctagacccttttaaacacgcgaagtgtaccacttaatagttcccgaagaggtttacaaggccgatttacgatagcaacaactaattacttgcctccatgtcggaatgatattggaaccgagcattgtcgtcactatcttcagtcctcgaggatgagggtgctcgggtatcggataaatctcttggcgctccagcattctgctcgggtatagcacccaacagcaatctaactgaaagcctcatgaaagtttccatattcagtcacctcgctctgatatactggcaagaagtgtagtcattcgtagcaagtaagttatagtaggtcgcagtcgtgtaaagaacacagaagacagtattggggcttctataaagacccagtcaccgggagtagtagaacactggaatatgttttatcgattccgtcattttggcttaatgattgcttttcaacggcgtactcggatgaagagaggacgaatatacaccgattctccaccgcgatatgataatgtaagccatggataaagtacatattctagcctaaaaaccctccaattcagttgattcaatatttcaatcgtgtaaaaatgctctcaaatcagccttctattgtctatggcccgtcagctccgatcccggtgtcaatgacatttggggaccttctatcctaccatgcacaacacaggccagataaccatgcgattatatcgcatcatcaaaatatccgcttgacctatagtcagctcgaagagcgtagcacgtcgctagcaaaggcattctccagctataacgttagccggggtgatactgtggccatcatgttgggcagtcgaacggaatacatcgaagtaagtagtactccacgaataaatagcacctgaagtgtactgactatctagacattttttgcgtgtgcgaaattaggtgcatcgcttgtccttcttaatttcgcctttgttttagaggagatcgttgataccttgactccaattggtaagggattatttctcattctactaattgtcgtagctgatgcggttctcaatagccccgaagcttctcgttatgacacccagctttgggaaatttcaatacgagaacattctattaaagctttcaaaaatgcttccttctttgcaagctgtggtccttgtggatccgtacaaactgaaggctcaaagcctaggagataaaatggtctcctatgaagtcttactcaagcaaaattttgccacgagcttgcctggcaatgtttcgcctcatgacattgtcaacatacaattcacatctggcagcactgggactcccaaagcagctgcacttagccactacaacattatgaattgtggcaagaatatcagtgcccagatgagcataagcgataaggaccgagtctgtcttcctgtgcctttgttccacagttttggacttatcattggtaagctgctcatcctctgtgagggttctgataatgctaaaattgcgtgaaggtatttgcaccagcacgtggagtggatcaaccattgtattcccatcggaaacgttcgacgccgatgcggtgttgaaatgcattgagggatatagatgcactggcatttatggagtcaccacaatgttcatcgaggagatgaagaacccgaagtttgcttgcaccgatcgctcatctctgaagttagacttctgtccaataacgctcgtcgaccttttaaaactgactcgtactagatttggaatcatggcaggatcagcaatgccacaggatttgctggaaaaggttgcaacctccttcccagttcctcgcctctacacaaattgggggatgacggaactttcgtccattaccactatgacacaccacagcgatccaacccccaatcgtcttcacacagccggtcgccttttcccgaacttcattgggaaaatcgtggagcctaacacaggccgagttctgccgtggggacagaagggagagattgtgatctctggatatggagtcatgggtggagggtatcttcgaaatccatccaagaccgcagaagcgatgagacaacacgtggaagacttggagccccatggagtcggacctgtggacagcgagggaaatcttagaacgtggatgcacacaggagatgaagggtattttgacaaagatggatattttgtgatcactggacgcatcaaagacatcatcattcgcggaggagagaacatttccccggtagaaatcgaagcacgactttcctcccacggggcgattgtccaggcttctgttgttggggttccgaatgctcgacttggagaagaaatagctgccttcgttgaactaaccaacggccatgctaaacctaccgatgaagagctccagaaatgggtgcgagcaagtctcagtcgcttcaaaacaccaaaacacttttggtggataggtagtccccagcatggcgttccccgagaatggccgaagactgcatctggaaagcttagaaaaccggacttacgggaagtcgcgaaaggtgagttaaatttgtttccctccgattttccctagacaattacactgacggtatcgggtatgacagagttgttggaggaggtgccggaaagagctcgactttagagagtcgggtctaatttttcctgtttctcctcttgagtttttccatgtctaccgtgactcgatcatgcgtcttcaatatcaagagcccagagtgcatgtcacagccactcagccaccaccacgcaaatcttctgtatgaagatccgccccacgggtgtggatcgcgatcgtcaactttaaagcttctttgttgtgccacatcttggcggatttggctgtaggggaataatattcgtaggaaaggcgtcacattaagttgatcgatgagcccgggcaggggggacaggagagatggcctcggctggagaacaagctgttgtgatggcctcaggcccgaagccctccacagttaactaccatctccttgtggtcatacaagcctagcaggacttagcaataaacaaaccaccattgagaatcaaaaataagactgtatccctgtagaaaaattaatattattctattataattaggagaaaagttaaaaaggcaagctgtgagtctgattgccagtcacatcaagtctatataaatcccacaccaagaaacatggtcatccatcatctggaaactctgtcaccagtggtaggtatcggctttgccagccgcagacaccaacacagtgcatattcgagcggaagtagcaagataagaattttgttgaagcggtaggacagggtaaccgtaaaaatcgccaccacagcatcgagccagtagtgatttgcggtagcgacgatgacactgaggaccagaatcgggtacaatatagcgagtgccaaaaagccaaactccgtcatgtaggacttctgcgttggcctgcgctggagcctttgcagaaatccggagtggtgaagaaaggtgcacccgatcacaaaggcataggtaaagtgcaggctgggcatggccgcgaattggttcacggactttccgccaacccagatgctttcggcattgccttggcgcacggtgtcgtagaagccatacgagtctggaaggagtcgtggcggcatgagtgggtagacacagaataccaagaaagcggcgagatttccaagtgtcattgtccgccgtgcggtcgcgaaagacgcatggttcttggcaacataatagtaccaggagaggaatctgttcatttggtcaactgactattcaaattggaactatatcaagtgaagggttactcacagcactgtgccgggaatgtgtattaatgaataaatgcgattaaagatagtcaagatcgacggatgattttgaataaaaaaagattggaaatcggcttcgttgatcggaaatatccaagacgcggttgtatgttcaaagttgagaatgtcgatggcgtggccccgcgcaacctcgacaacacctatctcggcgggagaaagccactgcgccgttgctttcgtcacagaatagaatagatagttcatactccagtagaacatctcaaccaagaaaggtagtttctgcagaattctactgtgaatgtggtgcgcccagcgagaagagtctccggtcttgacattgatcccgcatacagtttctgatttgggttgcagattgtcgatggaataagcatcgccctcctccagaatggcgtagcttcctaggtattgagattcattggaactcttgctagaatccctgcgacgattcacaatcaatgacccaaccataatacccacaacgacctgttcacgacattaatacacctttagcgatatacgcagtatcaaacttacaataggttcaagccatgcgtgtgacgctaattgtggcttacccagatcgggtgtatcctgagtaaaattggtgctgggcaccatacttgcaatggtagaagcttttcagaaatatacaaggtaaagcctccaaagacgctagagaatagaacaaaattgaagcaaatcaagattcaaaaagaggaaaagggagacaagacaggctaaatggatgctgtcgtgtgccctctaaccacgttattccaattatgcataatacagacgatacaataataatatacgagtacgaacttcggacggcggaatgattacgggaccgaatcccgaggcgggacatagcaaggagattatattggtatttgccctcctttaacaggccgagctcgttaacgggaataaatgcgttcatttacagtttgtatttccataatgatctctctatagaacacatttagcagaaactcagtccatttcttggagagaaaaaaaccagaaaataaaagctcttttactgccaatgacaattccaacgccatggcttggatggagtcgtaagggaggcgttcagctagtcccgaatagaacagacaagagtcccgattggcttcttcacattacgtacgtacctaggtatgcctccttgatccaaagcgggaacatatcgacctatcacgacatattatccgctctatccaatgattgtactcgcactcacctgattaccaggatattgtaggtccagctttagatatgagacacggacaaaccactgtccgaagtcgaagccaattattcgtagggagtacatactgtacagaaaggtctggatgcatatctgtaaggctgtaaaccttatcgatcttggaatgtgctttgtttgcattctaactcaaaatccgagcttgaagggaatctgtaattccaatactacactgattatttccatcctggggcagacccggagccatactttggaatgtgtgtttctaacaataacagccacttggaaactcgactgatgagaggaaaggcaatgtaagctgacagagatttatggatacataagatcatgccagttcccatgtggagtaaatcgaactcaaccttggaagttgggactagacgttgtcttgaacctcggcttgattttttatgcaaacgtcatcattgttgaccttgcaaatagccccctaagtttcgaagttctatactaaaaaaaagaagaaaagaaaaacaatgacctgattaatacctgattaataggggttcgtgaaaatatgccctaaagcaaggttagtaacctagggttggtagtttgttgatgtagggttgaaagaagggttgaaaatagggacgactaaatgtggataagtcaagctccccatgggaacctggcgcatctaggctcagatttcctatggactggtccgtagatgtgttaaatcttgccttcaaactgctgatccgcttgtggcttaccgtcctaccaacttatgcagttcatggtcatggattcattcccgaggtcgattccgaggtccggaggagcatccatggatgtcaactccgtagacggtgtgtattcataattaatactccaaattcataattcaactttaatgtggcaaactcgaatttgtgtgcacgtaatcgtctccagcccgacccacgttcacgagatggatccgtttcactatacggagtataaattttcagcttacacaaactacgaatctttgtggcacgcctaactatgcgaaaggtaaatgggcattaagattgtatattttcttcacgctccaactggccaaagcgaaaataaggtatgtaaaatcatttatcagatctaattgagagcaatcgttgctcgtttgtatactcaatcatatggtaagtgaagaaaatccaaaatattacgactatgtaccctttgtatgggtgtggcatataaaagatactcgtgtaagacaacatgcaaataagacaaataaactgcgcttaaccaatccttgtccctctgccacgcgtttctgactccttatcatgtttaaggttttcaatttattgcacaatgccattgtatgaagcaaggctattatataacaattcaataaatgacgattaactacccattttgagatgtagttagacatagtaagaaatatttgcctattataaatcaaaaaagagcaaaaaagggttagaactatcccgtgacgatcaatgttatcaaataagacatttgaacccctatagcaatcaatttcaccctaacaacctctggcgggaacggaagttggtatccccggccgggtacgagtatcccgagtagttttcaacatccggagaaactgacctgtccgtgatattttaccctggatatggggtgttccgatcgaaattgctttgttggagcttgtatctcgaatacattctccttggcacctaggtcgagagagccagtcagaaagggcaagtctagcccctagcatgggatttgcttgggagggctcagccggttcggctcgctagggaaagagattgaagtggagaagagaaaactatgataagctcgcaacctttacctgcgatgttatcatatgcagatcaagttcaatgcgctttggactcagttctccacgtcttctccccgtttccaaattatgccaacaagagacgttgacgaaaaagacgctggctaaaggctgcttggggcctgaggcaataaggctaaccattttctaagaagctgacaaccttgaagataactgcttaggtgtgttttggaatcattgcctacatgtgaacggtctgtggttggaagtatgcaaacttatgctcacagtcggaatgatgtctttccattttcataaccactccaatcctagatatacccatgcaaggtgattctcaaaactgataatacagacagaaacgataactttggctatttaataggcagatataataatcttgacgttgtaggtgctcgatttcactgtctgccgcagatgtgtagttgccgcaaaccctacggagtacatcgcacctgctttatgcaatgatgccaatgttatatacccgacgcaggcaccatgactctctctacaactaactagcctcagtcagcaagtcatacattcgcttccagcccttccatcatgaaaaactgggactacgggaagctcgccattgccactgccgcaattctcggagtcctcacactcggcgcactgatatacttgctgctatggtacgttcgacgaggactgcgcgcccggcggcttcgtcgccaggagaaggagaatgaccagtttgaccagtccgcagtgtccctcgccgaggacacaagcaggaccctagatcacttcctcatgaaggatattcaacctgagcggagttcaatcatcttcagcagaagccgatccccatccatcaacatcgtcattgacgacgcggacgctaatcgctgcaagtcttcccctcagccttatctcccagaacatcacactgcagcttcttcatctgcagttacccacgtcctctcacagatctcgactcaaaaatctggtcctgatgacccacggactcagtggagcagctcgggacagcgttcgtctagtacgacgccgcgggcatccacctcgtcgtccgtcgtcccagcatcgcaatcatcccaggtttggactacgacttctggtagcacaccgtcggagcagactcagagtgtttcagcacagcactcgtcgaccacgacacctcgagcatccatctcctcgtctgtcgtcccaacagcggggtcctctcaggtctggaccacgacctctgccgagactgagacgttttcgctccttagtcaatcctcgaactactcgcaccaccctcaaagccccattggcccatccacctcccgcagctcacagatatatacacgtcgttcgaatgcttctgctgcatcgagccgtccgtccagtgggggtatcttgcagtctgcatcccgtatgttcaatgaagcagaggctgctcggatggcttattcgaggaatatcgactctgttggatcaatgagtcccacttcccccgtctctccggtgttagtggatgtttcagctgataacaagctcccccaatggacctccgtaccgcctaccccctttcctttcagtcagctctgatctttgatgacacccagtgggctttttgaattgatattgcttatttgccgttgattcagacccgacgaggacggattgagatggattcaggttccatgcatgactagggttccattccttctatttgcattcccttcaaaccgttgatgtctttggaagtcaatgttgttaatcaaattttctttactgatacctctgatccattatgtacagcgtccgggtcttttttagggctacaatgtttactttttattcataaagaagtgcagtgatgatgagttagagatgaacctaaaaatatattccattgtgagtagttgaacgtgaaagaatcgagcaaaatatatagaactaacacccaaggcctgggttcatgaattacttgcgttgatttcttttgcgctttttagcgaggacgaggcctttatttttcgtgcgccaatcccagtgggtacttcctcctttcattcggcgtgtcatgagttccagtacagcaatggaggatctgcctctagatagaaacattgctgataccagcgacatcggtaaactcacgatgtctgtccaaaaaagctgctgttttggcatgacggtccgctttcatttccgacgttctaggaacccgccagaactgaacgctcatccccctctcctcccacatttccacctccccgagaagacactcccaaaggtcccggttcctgattggttccccagcacgtgtaacccagctgtactgtatccaatcgtatacctctctcgtgataccgtccactacatattccgagtctgtcgcaatgatcaaacgactaaagccatccatagcccagtctcgatatctcagagctgcaatgacggcgcgaatctgcgcgcggtcgtttgtcagcgtgtgctgttggccagtgggccctttgtactcgagaggaaagcgtgcgtaaccagatgcagactcgttgtagacaaaggaacaacccgctctggcgttcggtctgccgttgtccatacacgtgccgtctgttaagatgaggaattcatcctcgacggatcggttgtcgtgattcagacgaatgaaccggtggactcggtccgttgctgtgactttggggcaatgtgggaacaatgactgcggcgtatcatttggatgcggaggagcgaactctgtggggatgacgcgaccactaccgactctaagctccgtatagagtcgagggagcatgtggggcgcgaagtattgcgcgggattcacttggtggaaggacatggtggtttggtaggccatagcttcaaggtttagcatctgccggtggccttagtatatcaggcacaaaatgtaccttcaaatacagatgaaggtgtcggagttggataatagggagatgacgggaacacgacaaaatggtagcgagcctcgctccttccatacttgtcctggatgcctcaggccgggatgacaaaaatcaataatcattagttatatttcttggtgaactaccaaaaaaataagtaaagggaatctccacgcgcctcgctattccagtactggacacgctgcagaggtaaaaaccgacaaagattaaaagcacatacagaagcaaagttctcgaacacatgtccgccatgagatatacaggaaatgatagctgacacaaaaagaatgtggaagtaagtccttgagatctatccggatatatcatcttcatcttcatgcattcgtatcgcgcacactgcgtaggcaccgttcaagccgtttgccacgctccttttcgcgtacaagagtatccttgacaaacgatcggatggcgtcacggccaaccctttcccgccaggaggtccagccagcgagttcgcccaccacgacatccttgttccacgagatctctttcgccaaccgagtagactcggattcgccctcacgaaccttctgttcgaggtcacggactgacttctggcgagactcttcgaagcctggcaggtttatattgaatttgcgggggagggaagaggagaggagcgaggagcgagagcgagaggtatggcggtttgttgaagagagggaggacatgagggccagtggacgagatagagatatcagaatggcggctgttgtgttgtcgactgaggaaagagctgccaaatactgcaggagaggggaggagtcagatctagaggtcgataggtaggtggcgtaacgagcaaaggcctcaatgtgagagatcggaagtgcattagtgggcgcccggagtgtagaaaggacagatgagcatatcatcaccgcatcagcgagatcggaggttgcattatgcaatgcgtgccctcggcgaatcagcgaacgcgtattaacgtgtacaccgcgcactatgtcctgggcgtgagtgataaactgctctgtgtcgcgcatgccctccagtgagaccggcgcatattcgtccgcgatagtctctgtgagcacggcagccttgcggtacgatcgatctgcaaccatctcaggctgaagttctggaacgaggaagaactcccacagcatttcgtgagttgaaaaggttggatgagcgaggagcgtcttaaggaaccgatccagcctttcctggagatcatggagcacagaccgtgatggcttcgagtggatctggaatggattccggaaatccgagagagatggcatgtaagatgccggatgctccactgcaagccatttagccaaattctcaaagtcggagaaattacggcgacaggtcgtaacggtgtatgttgtcgatccgggtcgcgacgatgccacggattcggtgggaggaaatggcgcgcctgatttgagaatgaatcgcacggttgcgtcctcgacgaagtacgatcgcacgaccgttgtgacccgacccgaaggatctccgcaagccgatggaggatgggacaacaagatcaaatcatcgatgcgattccgcacctcatcatccttggctaattccaccgcagtcaaaccacgggcttctttaatatgaacgtcgactcttgggtctaagaagagaatgcggacttgatcaactcgcccgtacttgctggccatcatcaacggtgtaaatctcttgtcgttggtcgcgttgggatcgcaatcgctgtcctgcaatatgcgcctggtgatatcagggtcaccaacaatatgcagcagtgtgttccccttcatatcgacatgatcatcaagctgaagcggtttattgtcgccctgtgcccattgcgctgcagtcaaagcggcttggaccattgatttgtattctggatgatcatacgaccgacagagtgcaaagagcggggtttgtccatgtttgtctcgttgtcgccatgggataatgctgccaagtctctctagtagcgagggtgtgctgaaaagataatgagcaacggtgcgaccgtgaacgtcggatttggtcaaataggacgcaaccacgcttatatctgtctttgcaaataggaagtccagaaggatcttaactatctcggtgtgtgcgagttgcaccgcagcgtttaataacgtggtcccatcggtattggtgtcttgaatgatttcttccaaggggtagtattcttctagagtcaacaggtacttcaaagcctcggtctgacgggcctctactgccatcatcggtatggaatgaccagcaggatcttgggtttttgtcaaggtctcaatcgaattgtcaccttcaattccactggccatggatccgagggttgcagtcctggagatgaatgagacggctgatgactccgatagactgcgaacgtccattgaaaccttcttaactggacggtgcgggtgagattcttgtataatcgagagatcatcccaagtttggaatgggaaaacatgggacagcggtggtgcctccacaacagcttcatccaggtatgagtcgccattcgtatgactcgtgtaagagtgatcaagagggagatcatctggctcgtcagcttcatctgtctggaacagtacagactttcgccccggttccggtggactcgtgtcatctattgcgccatgatcctcgttcggttccagtatagatttcatatccgatattctgcccgcttttgttgcttgccacaaacgtctgttccgagcgctggcacgacgtaatccggcggaatcggtgacgagatacatcaaaacagcttcaaatgtacttagagcataccccatctcgccattatcaacgtcgtcgatgtaaataaaatgctgcatatacaacagtcgagcttggagatgccgtgtttgagaacgaatgacaacaataagcaacaacgagactaagacatcggcgttgatcgtgacagaggaagttcccttctcagatggcgagccgtccagttgatcataacttcccgggaaggagataaccttgactgttccaaggagagtattcagcatatcatggggacatcgagcgtcattaatcttccgaaattcttccacagctcgcccaagtcggcgaatcagttctcgcttcccttcacgtccaccttcaacagagattccgacttgggatacatcgatgctctccatctggcgaatgcgggaatccagctctgtgtcctctggttggcggaatgaacacagacgagggaaaagcagcggctcgtgaacttgctcggcgacataacgttctatcagccgctccactagaggaccggtgaggtcagtggttgcaccaagcaacgataattgctgcttgtcaacgaggcggaaaagatcaatggcagcagtcaccgcggtttctaagctccggcgcatgagatcttcgtcgtcctcgaagtactcctcagaattgaatggcaatcgccctctgctgcgtgatgaccagctgcggatagaagagctttcgtctgtaaaagactcgacgcgggacaacttgtggacacgttcactgccggatgcagatggcgaccgagaaggtggaggtggcaatggtttaccaagttcttttccaaactctttgaataatcgttccaggcccggatgcatctgtctcgcaatcatcgggtaattggctagcagttccccgaaagatttgatctcttgttttggtggtgtcccaattgaatctccgtttccatacctcctatctggtgtagtctgtccgaccacgctggcgccgcttccagggactacggctggtatgatcttcgcagggtcatatgttccgatcaacgggcgagagatgtagtaaatcagccatgggcgcgattcgttggacgggttgtaatatagcacgtcggaaagcagttgggcttgtgtgagtgacttgaatcctgatagagatgatctctgttagctaacatatatgggcgagtgcattcaccagcaagtgctctcacccttgttgctgtatactgagttgtccttgatgatcaccgtccggccattaaacgtggtcacctgctttgctttgcctctgttttctcgcatattgctctcttctttcgaattcgcagagacagtgtggattgggatgcggagcacatggctccctaaaaattcctctgacgcgcaaagatcggaatatagcaggttcgactcccggtcgcgtgaaccgatgagagactctgtcgttggaactagcaagacctaaggcgtacacacaagatcaattagccactccggatgatccgccgacatatgcacagcttccacctacatgattctcaaccggtacacactggcccgggacagtgcttcgaaagaaggcacggaggaaagggtttagagggtgcatccaaacggttttggacggcccagtcgaaagactccagcaatcatcaagccgtccgtctcaaatctccgaagcaggggatatgtgcgccgtaagatttcgcggggaaggacagctcgcatccaacaggcagcggcgcagtatgaagccagagcgggtcgttgaattaagtggacagagctgcaaataagctcgaacaaaagcacaatgctagatcgcagaaaacaagaagccacaaatataagagttgacgcagaagcacatgtgtcgcgggtaaatccagaacgtgatcgacaagttgatgggcgctatactgcattgggtaattatttcattcaataaactgcaacctcgggttcctcttgcgtagcttcggagatttcctaattccataagatatttcatcatggcagaaatcatgcatcgggttcaatctccatttacagagaggtgttgcaagtggagtttgtgtagtcctgtcatgagatttctaatatacagagaatagatggcgacaagcatgccattagataaaaacacaaaaagcacagccggtctctccacacaatgcaattcagtacacttgtgctgcacacaagcagccaacccaaaataaaaacatagtctctcctgtggagggagatcaacccagtctacgcacgtgtctgctgcgagtaccaccgaacttcagacgagtcgagtcggtcactcgcgcaacaagcccccgaatgtgtcgtccttcgtggcccagcaggacctttgtaaatgcatcgcggccctttccgaacccacggtacacgacctccaaccgctcgatctccatcaggaagcccttttcctgaatctgattcataacatgagcagacagttggtatgccgggtcaaagccggagcgaccagctttacggaaacctatttgaccgcatccgatagacataagagggctcccgttcggtcgagtcaaggtgaggattgtgttgtgcttgtggcagtagacgtgcaggtggtggggaggagctcggtcggcgtaggggttcttgaccatgtcggcttcgaggctttcagccatcctggagtagtcagagctaccgcgcgaggatagggctggcttcttgccctgcatcatttgggtgattgcagaaagcggcgacgaggaatctgaaggtgactcgggttctcgcttcagaatctgtttctcaatgacgctaccttcactgcgcgcagaaaacgccgtgctttggtgggagaataaacgtgtggtgctcaaggaggagattcgcgggtgagattggcggcatactgatggcaatgccttggtcaacttgctcatcgaaaaggagctcatcgtggtacagcgacaaaggacgaatacgagatgagggaaagagcgatgggttatagaaagccggatcaattgaacaccaatcaccaatccaatgtgttgaaatggccacaaagcgcgggtggtgtagagccgttgccggaccgaagggaaacgctggaagtttttcgaagtcttggcatctgcactttttcccttcccggagatctttacctctctccccatcaccttcttcatatcgcgtccaggctgggctggaatccatcttgcctctaccctcatatttaattctatttgttctcctatcccttcaacgctccagaggatgattccggctaggatgtctgcggcacgagccgtttccttgcggtcccaagcaccgtctctcagagtatcatctcaccggttgtctcgcgccggatcatattcaaccgtctcagctcaagcattcgcgcactctcttaaaagccaccgtgctgtcctacaatccccttcccaccccatccctcaacttgtttcgccgttcgccgctctccctttgacgcggtctttccacgccgcaacctctctttggcaacagcagaagcaacaggaaaaaaagcagggtgaggaagagaaggctgaatcacagggcgaggagtctaaggaagagaaaaaagagaagcaggaagagaaggttccgccaccaccccacggagacaagtctccttggcaggtattccgtgagactctgcagaccgagttcaaggcctccaaggaatgggaggaatctactaaagcgctggcatcctcagctcaccaatttactgaaaatgagagcgtcaggcgtgcgcgcgctgcttacgaggctgcgtcaagcgccacaacctctaaaacttccacagccattaagacgaccggtcaagtcattggaaagggagctgcttggacatggaacaccagtgttgtgaagggcgttcggaagggtgtcaacgcaaccggagagaccctcgagaaggccacaagacctgttcgagaaaccgaagcatacaagagtgtgaaggacgccatcgatgatggcagcagctcacgctacggtggttgggtcgagaaggaggaacgtcgcaagcagcgacagcgtcgagaggagcaagagctcaaggctggaaagtctctccacgttgaggagagagttgaagatcccaagtaagtttagatgatgacaagggttcaatctggcgttcctgactcatttatctccagtgccggtaccaacgtcactcttcacaaagattctgcctggaaagattcctggagagacttcaaggactccaaccccatgatgcagaagctcttctcgatcaaggaaaactacaacgagtccgagaaccccctgatcagcacagcacgcagcatttccgatcgcgttgctggtttcttcgccgaaaacgagaccgccatggtcatcaagaagttccgggagattgaccccaacttccagatggagcctttcttgcgcgagatgcgtgactacatgttgccagaagtcctcgacgcttatgtgaagggagatattgagacactcaagctctggctttcagatgctcagttccacgtctacgctgctctcgcaaagcaatacaccactgccggactcaagtcggatggtcgtattttagatatccgtggcgtggatatttctcacgcccgtatcttggacccaggcgacattcctgtgttcgtcgttacttgtcgcacccaggaggttcacgtttaccgcaagatcaagacgggtgaactagccgctggtacggatgacaaggtgcaactggtcacctacgccattggattgactcgtatccctgatgaagtcaacaaccccgaaactcggggctggagattgatcgagctgcagaaggctgcccgtgactacatctaagggcgcaatctgtacctctccattctatactgccacatttttctctatcatattgtcggcatatttcttcgtggacctcaccccttctgcatcttgacttccactccaccccctttcgactgtacaatacaactgtttggtattaagccaggtagatcctggctcctattacggttatgcctgttccagtgactgccaatttgggccttcgctggttaatcggattttttttcttcatgtattaatgcttcgtccggtctgacattttgccccaagtcttacttactccgaggacttacggctcagtccgctcaaatctgaatgttccatctttcccatagactagggtgcgttggattttatctgaaggcatttctctgggtctcgaggtgttctgctggcgtctgtgcattttattttcactctcccctcgccaccgtgtatgactgcattgggttgttggttttggtttctgttggggccgtaatcggtcaccaagatatgaaaattcttgaaaatcgtgtaaatatataaacagacatttctagcttgatgattttgatatcttgtagttctctctcgagtaccagctacccgtagtactccttccatgaacgtaaacgagctaaagccgtcatttatatagtggacccaactctcaatccgtaatactgaccaacccgaatgaatgccatgctaaagttgtatgttggtgaaatagatttcctacgtacctgtacccgggaaattacttcaaacccagtataaatggaggaattcttgaggattgctttcaatcgacatttgaccgaagtaaaaatggcggttgagggtggatctacgtggacatgagcaagagaaaaggaagtgagtttttttttctttctaaaaaaacgctttgaaaagtgaatttgctacatggtatatcagattgcgtctgtcaatttctcaatcgtcggaccggaaatttagtgcgggccttcagagccagtaccagcaccggcaccagcgccagcgccaccaccacccatcatattccgagccctgtgagctagatgtcagtaatgtgatttcagaaaccctggtatttcataaacttacatatttgcgaggttggggtcgctcatcaggctggacatgtcaggcatgccgccaccctggccaaagctttcagccatctggcggaggcggggattgctcatcaggttgccgagcatatcggggttgctcatgagattttgcgccatggtggagaacatcgggttgctcatcagggaacccaagtcgggcatgccaccagcaccaccagcgccgcctccaccaagcatgctggccagggaagacaggtcaggcatgccaccaggaccaccacgcgaggcacccggagcagtgtccagttcctcggacgggggctcggtggttcgggtggtctcctcaagcttccgtgtcgatgtctccaagccacgcttcatggcctcactaccgccgttgccttccgcctcaatgcccttctcatatgcctccttggcggcatggtagtctcccatatcgaagcgagcaagacccagacggctccacgccttggagtatttgggatcggcggcagcagcaacctctgcatcactcgcggccttctcatgctggcctgaagcggaaaatgcggcggcgcggttggagagatagatggggttggccggggcaatctcgagagccttggtgtattgctcaatggcaccggcgtagtccttcttagccatgagagcattaccctcggacttcagcttatcggattccggtgtgggcacaccggccttaggcttctcttcctgggaattttgagctcctgcggtcgattgcggggtcgacttgttgcgcaacttttcgtagacgttgtagattccggccaacgattgtccacccacagcatccttcacagcagcctcgtcggtagggtcaactttgaaggtatccgcgatacaagactgggcgatttcaatagactcggcatcatcggcggtgagggtaccatctttcaggctggagccgaggaaatcgatgatggccaaagccaagcgcttgttgctttctgttggagcctatcatgaatcagtaccatgaaacaaccaccacaggcgagaagcttaccattatagcaatatttcaataaataatgcgaatcaaagataaacagcgttcaggagtgatcaagatggaagaaaaaacaggcgaggcaatgcggggggaaagcttttgcacgtgatcgtagcttatcgtttccccggtctggttccatgcctggactctatttcttaacatttgaatttgtgctttgggggttcttgtctgctttgctgacggagaattggttccttggagatgactccatgtgagcttcattatccatcttaacccctgaaactgacctgagccatgtactggcctcatggagttcccagggtctacgcggtcaatggacccgatattgcctatacctcctctgatgaggatcgcgaactcctgaatacttcttcaaccaatgatggcaatgcctttgacgatggcgcggaaataagagagagcgacggtcaacatgagtccgcggagacccagccccatgagtcgcaaacaaagtcctccctggacactggcaaatcagaatggggagacgaagctattagaggcatttgtgtttctcggtctgggcagatgtttgccacaatgtcagagtcatcaattgctctttggcagacacgggtatgtgcacaatgccgttatagtccatgggggaagtttgggctggtgactgacaattctggcagcctacagcagtagttacagcaatctctcgatctcagttctcgttgaaaacatatggtccgaatgtttcactccttatgcacccaaattcgacgatcctggttgtacagaccctcaacgggtacctgctcacgtactcggtgacttccgattcgacaacccaagtctaccagcagcgattcgatcattccacaaacccccgtcgacaacaattggcccggttttcagcagttgaagaggccaatgtggttggggacatcaacattcgtttccgaatggctatcaagatcgagtcgggaatcgtcaaggcgctggcgctagatcaagaacttgttgtcgccaccgtgaaacctccagctatacaatgcattcggtggacacccgaggcgggaggagcacaaaccacatccgaactactgagtcgtatcccagggatctcgaagaaggtctcgatcgtggacatggtttacgatcgtgcgatgaatctcctcatttggattaccagcagtggccagacatatgccgtgcaacgagattcaggctcacagcaggatcctgaagcagcaaagaaactcttccacggacattgcttccatgatccgaaggatgacagcgaaaaggccgtgaaagttactgtaaatgcacgcttctctctgttgactgtgagctgttcaaacggtgatatcttagtttacaccgcaaaggattacatgggcaacattccactttcacaaaagctccatctaccagcgtcgcccacaaccactggggctttgactttcatgagctattctccggatggatattgtctctttgctggtttcgaaaacggctggacaacatggagtgtttttgggaagccaggaggaaacagcttttccgtagacactacgttggcgaccgccaattcggaggattggttaactggtgtgtcagacgggtgttggattggcggcgggtcggacatcattctgtctggacaaaacgaccgtcgcctgtgggtcctggagacagctcgcagtgctttgactggttgtttttcgtctgcaaacttggcccgaggcctactgcagaccggtactgagtttatcctctaccgcggtcatgatcttccagatctcatgacaatatcaggaaaggattcattgtggcatcatggccagtatccaccggcatatcttcattcacagtggccgattcgatcttgcgtcgtgtctcaggatggacggtatgtggcaattgcaggacggcgtggcctcgcacattacagtgtcaatagcggccgatggaaggtattcgaggattcaaaagccgagagctccttcgctgtgcgaggaggtatgtgttggtatggccacatactgatcgcagcggtggaaagtgacgggtcatacgaggtactacatatctccccctgttttggtgcatgactgatttgaattgaaagattcgtctttattcgcgcgaggcttctctcggtaacaattcgattatgttcatcgaatatctcccatcaccagttgtgttcattggaacctctggggaagattctctcttggtttatacatacgataacattctgtaccattatatcattaattcgacacaacctcaaatcactcttgtccctgttggacagattgctttccatggaattgttcgggcgccctctcgcgtccgatcgatcagctgggtattgcccgaggagcagatgcgtgagttaacttgtttttatgcagttgttcgagcacaacactgacagcaaagcaggaaacggtgatccatctcaagatgtgaaggtcgcatctgtgcttcttcttgtggacggcaatttggtattgttgcagcccacggtctcagatgccggtgacctcaaatacgacatgcgcgtcatatcccatgatgtcgagtattatatcttgatgcgcgaccaaatctccttcaacttttccttgcaggttgatgaatccctacctgctagtccttcggttgatatagcactagagccacctcatagtagtctgtcgctcagggactctctttggatgttccgtggtcaaaacctgcttgcttggaatgatgttcaagatgtattgcgggaggagatggtgccggcaccactcgacatccccctggacttttatccattgtctgtgttgctgaacaaaggaattgtgctcggtgttgaatcggaaatgatgcaacgtcgcgatgtgaccttcactgtcctgaaatttgccattcgggtaagttgttttctctatcgataacaatttgtactgacatatgcacctcagacacacctcttcttaccatatttccttcaatatggcctggcgagtgtcggaacgcccgcggctctcgctctctgtcgccatttttcacatttgtcttacttcgctcatggattggaaattctactccaccacgtgctagacgacgaagtggataatgagagccgagcgaataaaagtgacaatccccaagcacgagcagaaccactactcccaactgtcattgctttccttcaagcctcgcttcccgccagggattaccttgagattgttgtacaatgcacacgaaaaacggagcttcgctcatggcgcacactgttcacttacctgcctccacccaaggatctttttgaacaggctttgaaactcgactccctcaaaactgctgttggatacctccttgtgctgcaagccttcgaggatgaagagcatgggcatgatggccgcattgaagaatatgttgttcgtttgattgctctcgcctcccataagggagactgggagctgtgtgctgagctagcccgcttcctcattgcgctggatgcttcgggtgagatgctccggcgcgcaatttcccgagttggtctacgacccaactcgcagccttctgccaaaggcacatttcccaactcggcaccccgattcggtcccgcaggtgttcaaggtcttggcttgaacctcccaatgaggtcgccatcatgggcgtccctttctccaacatcgtctctttcgcctcttcccagccggcaagatggtgatgtgttagatgaagattgatattcagcgcatgggcaagatagataattaaggtgttgatagaacaatcagataataattgaacaacaatctcttggttgcttggtgacaaaagataagccattaccgagatgactcgagaccttgcaaattcgcgagagccacctcggttatgacaatatataccagactctttgaataggaaatatgatattcatttgatagaaagcactatcacgatgcaaggtgcttacagatatatcctataataatctcctgatgcctgccctggtaattttccttcctgtctgactttgaccaacagcacacaggttacaacccaggaactgctcgcctgcttcccgagtgagggcttttaaattcgttcgcatttgcctgaattgcatcttcttttctccgtagacatattgcaatctccattagaggaacaggagtcacctgggcatttatgttggcgtcgagttgatacatggccattcgtgtttgccactaggtaattgatatcaacaacttcgcacttgagactctccacttgaccgccgacataggcttttgggtgtttatccgatttagatgccttgaacatgtaagaatgggagcgatcgaaaacaaccaattcactttcgcatctttcaccactgactcgaataattaacatcaatcatagagaataaaactggatttataacctacccgtaaagtgtgcatatctttttcttgcctgatggcgcttcacaggggatatatacggacccgacgttgcgatgactagcagagattattagcccaggacaaggacaaccagtcatgcacgtactactctttgtcaagtttttgacatgtcccgtcaagatttaggtccatactgtgaccctggaagccctgggtcgtgtagacacggggcttcgggcaaatatcagtctggccaaaagccaccaacggatgaaacaccagagcaaaggctatgacactgcagactagcatgaccgaagataaaaattagagctccaggagataaatagagttgtgaaaagcatattggcaagtagaaatatacatcatgcctcaaggccgggtgtaagtccgggttgacgggggtcttgcgtaagggctactcctactaaaataacccgaagacagctctgaggttaattatcctagttgctgagctcattattctctattactattatatatagtaccaattttaagaagaaggatgtaacctgtacattaggcatcaattattgaccagaagagacaatcagaaaaacttcacttaacataatcaacccatttatgttgatgcaatagcaaacagaacttctactgcgatcagaaaggatttatcaaaatcgtagcactattagccaaatatatcaagccatcgaacggaggctctattcctaacacctccatgtcaaataattagctcgaaactacaagagttacctaataaagaactattcacagccacaaaaatttatgcagtggtgtcaagcagttagcatacggatagcctcgatatcaaatcgcaggtgtatctcgtactcacggccgatagtgtgaattctagcaatccgacgggtacctctctcccaagctccgagcacaacgcatgccgctgccttacctagctgtgtacctagaagctctcgatactcctcggtaccatactcccatgcgtgactctcaagacgatcacgcgtaggccaatccaaatcatgtctcgggtagaggatttcctgcacatagggcagggtctcttcattcacgatattagtaaaataaatatatttgagagtatcgatggggtggtcaaaactatattgagcgatagcgacattggaccaatgaggccccgtgtacctgtaaatacattcagcaattagagcgccttttgcgaagctatgttgatactgggtttcctttttgtcgccatccttgttatagccatagtggaacagtcgtgtgaagcggtattttttgtttgttattgggagtcctaggtttttcaagtcatccctgatggatttaggtgggtcatcaaaatggttcactggacatgtaaatctttctctcttattgctgttattgaacagatcgaacaatgtctgtctcgcttgcccacaatggcagccgcctagagttgggttggcaatccatgcttggtatgcagctcctttttcatggaacccacagacttcatcgtccgacagtgggggcttttcatcacctaaagggctattgaacgcaattggagtcattccattactcgatgtactgctatcatcgggaatgggatacaggagaggagatgctgaaggttctgcgattccttgcgaaagtactggggactccggggatttgggattcagacgccgccgagttggggagcgagaagaatcactgtcatcatcgtggctgcgcccccgtttgtgtagatttggcttatgtggtttagttggtctgcgtagccctgctggtcgatatgccattttacagtcccgcggtttgttttgtgttgtgcagaaaagatagacaattcgggtgccgttatattttgtagagatattatctcagatgaatacttgtaatgagcaaacgagaaacaatatgcttatatagtgctgatgagttggccttcataatatgttggatggggctattgaaagaagaaagaaacaagccctcgacagaaatagaacacccaagagctcacccaagtcatgaatataccaagacgtcagaagattgtatgtacaaagagagtagatacccgcgacaaagagcacaaaaataaattcacaaagagttcgaggcaaaacaaagcgaaacaaattgctttgttgggacaatactattctaagctataggctatattaacccccaagctatgggtgagatgcttgtaataataggtgcggtctatgattgacacaaaattattctgagagattaattttagaatagatgccctatagagcgagtgagatagatacaggttatgaagtgcagtgccggatgtggtaattgaccaacttgagcatcaagaacaagcgtccgaaacagctagttccaatagaaacaatcaaattatatcacaagacaagatggatatccttccagcctaactcttgagagatgcactcgtattcgcatattcggttgaaatactgcgacatatgttggcttaggtaaacctggaactgcttggaggttgctgtgtacaaaatcactgttgtccctgtagcaatcctgggcaatatccgatatcccacttccaccctccctctttgacaagatatctcgcccgtattcatatcttactgctagtaagatggaacatgcactgctcgcagtcctgtaaatatctcccggctacgtgtgcctccttcttgtcctgtgccagtcgccctgatgtcgctgaacccggccccgagctcacgcccgagccagcagccgccccacaccaacgctgcatcgagatgttctccgactcggctcattcgcgccaggtcgtcggtcaagataacagctcccattccatttgaattgttattgcacaacttgactgctttctcttctgtatcaaatggcaagacagtggccacaggcccaaagatttcctcctgtaccacgggactatcagtgcgcacgctgctcaagactttagggctgatctagaaaccatcctccgggacatcatcggggatcctgccaatctcaaacctggcatgttcttcaccagcctgtaccaagtgagatcgaatcttggaataatgctccccgaacacaatcggaccgagttccttgtccaacccgtagttactgtgaacatatcgggtaaacttgagcagaaacatcctgtaaatcgatttatggacgaaaattcgagagccgcctagacagagttgtccgctgttctcaaatgccgcgtaggctgccgcagagaccgcctcatcgacatcgacatcgccaaagactagtattggactactgcctcggatctcgagagacatgtgcttgtgaatgtcagccgccgtgtccttccgaatctgaattccggtttcgatcgccccacagaacgaaactccttttacaagcggcgagcctataagagtggaaccagtgtcggttccatttccgaaaacaatgttcataacaccgggtggtagctctgcttgccgaagaacttcgccgaacactatcttcagggttagtgcgttcatgtaagttcgtcaaataagataatctcttacaaaaggccgtcatgctagtcagttcgctcggcttagccacacctgtgcagccaaatgcgagacagggggcgattttggacgtcaagaggaaaagcggcatgtttgatgaagtgacaatggcgtagacccccactgggactcggtgctcgtgcgtgagagtcgaatctcctgtgcctttgttgagatgtaccacactttcgtcgtgaagaatgtattttgcaaaatatctaacaggaagaaaagttagagtcggtcatatacatcagacgagtggacggaccggaaatgctcaattgaacgatcaacttcagaccgagcccgaaagagagttttgccttggtcaatactctcccatactgtaaacatatctttcttttcctccagaatcgacgcaactcggagtagaagatcagaccgctcgtggggtgtggtctgtgaccatgctgggaaagctcgagacgcgacatttatagcgtagtcgacgacgtttgggggactgagaggcactttcagcaagagtttgcctgagcgaggggaaggtgaatctatccattccggtgtgtgtgcacaatcaaggaactggttttcgatgaaattctgaagctgaaggggctcattcgtggagttagtgaggtggtccgaagttcgcaccagggtatcgagctgccacaacgtagaaattgtgttcatgattgctataattgtagtgagagaggaattgaaggcagtcctatgcttgggatagtgaggctgagatcagggtaatgtgtgtgatacttcctggactcaaagataataccttgtgctgcggatgttgatgttattaggatgagacgcgtcgaggaagatgaccataatgattataacaagttcgcctgtttattacaccacttccacccactcagtgagagatccaaagattaaccaaaacatatatgagatgatacctcactatatggcttcttaattggctgatttgagtatatgaaaacatcttctataatattagaaactcggtagttctttcattctgctatcagaggcagaatgaatatcaaagcgtttagcagatcactgaagcttcaaaccaacatggtacatggtccccgaggtcttgcttcctaacacactgaaagggaaggcccgagaattaagccatattgcattgctcaacctcgcaaacttgtgtatggctgcatatagacgaagctgagtacatgcctgtgatctatacatgaaataacacgtgatgtggacccactttccccttcgggagtatatagggcacaggaggtatcacccctttcatcttttttttgattttcaccgatcaactccctcctgcttttgtcgtcttgtagagcagcagaacatattatgtacattaattataactaatactaaccaagtacatactaagtgttgatgatctgcaggcataaacgttatattcaggcatcaacatgtgagggcccaccttccattttcggaagcatctattcccatatatttcacagcaacaccttccccctaaccgagagtcccccagtggctgagtgggctcgcatgcatgtacttggtcaatccagctgcctgcgttcgacctgctcagtccacaatcctaaactttccaattatgcacccccaaccgtcttcttcccaccgcaggtccaggaaccagttctgccagcaggcaggaattgaggatcttggggtcgaacagattgtcagagagctttatgggccaccaaaattggtacattggttgggcagtggccaccactggctgggactctcattttttgggtgttttttttgttttccttcccctttctattttcctctcttgtcttgttagcgttttccacacaagataataggaacccccttgacccgaaggaatgattgcaaggcttcttggctactatgtagttgaaagataaattcactccatgtcagacaggtctgttaacccgtttccagccattcgagcattgtttctcaaatatagccgaggctctcaagctactattcatgcggccaagagcaagggtcatagacataggactgcctgctttgtcatagacaaagccaagagaattcacgtataattactcgggttgttcgattctttcactctttgagtctttgtcaatttattcaaacaaaaatgctgcacaatgccattaaccaggttctctttgttacttgtccgtattatttatgctcgcttcgagcatataagttcgctcgaggtaccctgttgtctaattggaccattggaccaattatatcccgcaatggcttttaagtatccccagtttgagccgtatggagacaagctaatccgatggatggaaaatgccaacgaacccgggtgcccagtttctatgactacacttaagtcacagaatcttccaaagtcgccggactggaacatcgagtacgaaagagaatggttatcaccagatcgtattgcctctattgtgggtcttggtctgcgagttggagagctaattccaaacgacttatatcccacagagtccccatgtctacggcattcaatcatcaaggcccgtcgtaatggaatcacagccttggtggggacaattgcaccaggagtactttttgtttattctattaggagataccacgagtcgaacgatccgtatatatcagatcttgccaagattgcctatggaacacatttttcgctggatagtttgaaatatatcttcatgaacgacgtgcaggaatctgcaactgaaccatttatcgaggaacagatctatccatctcgtgcgggaataaagtatccatctgcagagagtcaaacctgggactatccttcgccggagtttagagctattatgggtacccctatcggtaaagttgtcggatacttcattctaggtgcgtttggtcaaggtgtaaaacgggttgcacgaattgtcacttttcagactggtcttgaccttcacaaattggaaattcgttttgatattgaagatgttcgaggaaatctttctttgggggaatttgatttagatataatatcataagagggagatagagtggggacactaatcaattttatattataggcgtatcagaatcttagattggggtagccctcaatcttctagcagtttattgtaggctaataacgatattggctaaaaggatatcaagtgataaccaatagtcaacacactgcatccattactccgcataggtgagggcgcagggccaagccactcacgggactcggcccgggccgcgttggccttttcggtatcaaagtggggatgtctgagaggagaccaagtcggagatgactggtctgtacggctgtggggccaaggaaggaggtttgtgggtgctaggactgaggtcaaacctagcttgtttgatggttcgttactagactttaattcattgaatggtctttccacatcatgaaaactaaatacatatgcagtgtcatgatcaatatatgctaagaccagttctaacgctcgttacttaattcgcagccccattctcccgttcctttaacgcttgacgaactttgggaatcacgaaccgtccataatcaatagcgtcgttgagattgtcatagcctcggatagagatgaggtcggcaccaagatcaacatagtcaagaagcgactcgacaatagtcttgggcgatccaaccagggcagtggatgcaccacgtgcattcgttgcagtaacagtaggataccaaagagcgcggtcctggacttctccgcgagcggcaatatcaagaagccgctgagagccggcgttctgtgggggcggcgcattggcggggaccttgccttgtcctttcgctcggttggtagtcagtgcatcgagggtttggtgtgctttcgcccaggcgaggtcgtcagtctcggcaagaataggacggaaggtcacccagatgcgaggtctgtctgagtccgggcgaccggcctttgctgcctctccatagatgcgatcaatctggtcctttgtttctttcaaaggttcaccccacagtccgaatatgtcagccagggagcctccaatacggtatgcttcgtccgatgaaccgccgactgagacaggaattgtgccgttagtcggccgaacgcggttgctgaattgtttgaaggtatagtatttgctctcccagtcaaatggctcatcggatttccatgcgcggcggagaatttgaatgtattcctcaaggcgtccgtaacgttcatccttagtcaggaagtctccttccttagcctgttctgcatcgctaccacctgcgataaagtgaacaacgacgcgaccggagctaagttggtccagtgtagctagcgcctttgccgcaactgtggggtaaagagtattgggtcgcagagcaatgatgaccttgatgtttttggtcaccgacagaatggtggctccaatggtgaatggatcataggatgaggagtcgtagggcaccagcgtgtagttgtaagcatagtcatcaaggttgcgagcgtagcgaacgagatattcaggatcaatcgaagcgttgggaattggatggatctcggtagatgcgttcgggaacgtgacgctgatgaattccggcatggtgactgcttttttctgccttttgacgttcttaattttcttgtcaggtactattttacttctcattcgtggtagaccgatcttcttttaatacttcgtagtatctccgagttgatttggcatcaacgcatgacgcaagatggtaagatattgcgtcttagcacgcaagtcgataaccatatcgttccacaccggatcagatgttttggattttcctaattcaagtaagcgttacttcttcggctgcattcagtgaggactagtacgaggaccagaaggtattgcgccagtattgcgcaagatcgaccatgggaatcgcaatatgaagttgactagcacccaggtaagcctatagaaaactagccgagatcgcagttcaatttccgctgacttctccagatcttcaatctcttgataacgagttgcagggatgtccatttatgacacattgatcactgagataatatgcgtcgtgatgtggtgccggtacagactcatgccaggctagcttctgcctttaacgctagttgccggcgggttaatctatatccagggcctccataaagtgcaaaggtcataacaaggttggtcgttctgctcaggttccttcggcagagcgtacaatatatatcccgagatctcagactctcggggttcatcccaaatgcaagcgagacgtgtcctttaaggagttatcgtggctatcacgcgcaatttctactccaaggcagtattctgtggttttttcctgtgagcctcagctgagtgcaaacaatcaatggctgaagttatagttggaccagcgctccggccaaagacccggcagcttggttaattcgagaccactcgcctgttgctctgattgagcttgcattcgatttccacgcaatagaggtcaggccatcggtatacctctccaagaccgtcatatgtgatataccctgtcagacttggttggagtgcgttgttgacgccttgggccggtccaccagcccaagtgggcaccccatccgccgtcagatcatgactcagcattcaggtccggtcgcacgtgccacattcaatgcgagtccctataggatctatcgaatacatagaggaagattggtttgaatcttgaaattcatccagcttgacatcattaccaggttcaaaccaataaggaaagcgacaacctgttgagaggcgcgtgatgataagacgctagtctaaatcgggatactacgtcatcgatgagggatgggttatatccgcgacatacctcactccatcgtgtttcgtttacacatgtttcccatttgaacaaatctactacattgaaccatccaccatgccactcgttgtcccaggaatcaacagctcatttggcgataagtccgagtgggtcaacaagctgatgggcaagacgatcagcgacactactaatgagacagtacgtcacctttgagaaatcatcgaaatcaaatatgacattctaaccgttccatagtcttttgcaaagaaggatcttcctgaatctcaccgggtgttgaagccaggtgacgcgaagaccatggatcacaatccaaacaggtaaagcctcattgcaaagtgccgtgaagccaatgaccatgttgctgacggtgtacgattgaacatagacttaacatccttgttgatgatgctggagaggtgcatgatgtgaactacggttagagctaagatatatttactaagcctggtggctcaaatcacaagaacaaattgagccaattgaatatctattacttgaaagtctattgatgtcctcaaattagcatcttgtatgggctaactcactcggccttccatctgagtagagtaagggagtgtcgcgggaacacatattgtccacttccagtccaggtcgactcttggatcgccacttcttctttgccgttcagatttgtcacggacagatcgcccgcggtgaccgtgaacacagctacttctccctgggctccctcaacatgactttccaagtctcgggagtcgtgaatattcaccacagcaacattaacaaacccatcatctcctacagtggcacttacatctaaccacggcgtatccttggcacttcgaatccacttgggcgatgtctcaccctcgtatgttccacaggaaacatgactggccacggtccaaccacgcatatatcgtgaaaacagccaaagcggccaccaggtggtctgcttggtaattccctctggggtagtcatcaagggcgagatgacattcacggtctgcgcgatacacgccatgctaacatccttgctctttcggacaaagacattcaaccagacggccacggcgagcgcatcggagagcgtgtaattctcttcggcacctaggctcccctctgcgcggattggatcccacacgttccactcgtcgaagcagatcgtcgggcggagttgctcgggaggaactttgtttacaaccctggcaaggtcaatcaaagcggacgtaatttcaattgcgcgctcggcggcgagtggcgctgtcacgttgaggaggtgggatgatgaagacgtgtagagatggatgctgtgcatgtcaatcaaagggactgagctggttgacaatgcggagtgggcaggtacaagacactgatttagtgtgtagtaatcccacgaagcagtgccatcttggccgcagaggatcaatatcagggtgggatccaggagtttgagagctgtaagaaaatcatattagcgcgattgttctggtagtattgaaacgaagcattacctttagcccattggattgccttgtgagcatacgcttccttggtcatctgctcgacctgccaaggaccccaacactcgtttccgagggcccagtacttgacctgttcagggtgttagatcgttgcagctgaaaattttgcacttattacatacattgtagggctcctcacgaccgttctttcttcgtagattggcatagtaagtattgcccgttccattgcagtactcaacccaacccaaggctaatattgtccaacatcagcatgttgtatcaaagtcttaaataagaacgtaccctcatccaaggtaccggtaccaaagttgaagcaaaggtacggctccgtgcccagagcttcacaccattgcatgaactcgtcagtaccaaattggttcgtctcggtcccgagccaagcaagttctggtctttcgacagatcgacatcagcaaagttccaccaaagttaatgtgatatgagaacataccttgctggccgttggttcttaggaccaataccatcgagccagtgataggtcgcacaaaagttgccaccaggatatcgaacgacagggatgttgagccccttcaacgcctccaggacgtctttgcggaatcctttctcatctgacagtgggtttccagggtcatagattccaccgtagatacaccggcccatatgcctaagaactagtcagtttatgtcatgagactggaagaagttcaagatgccttactcggtaaagccggcgtaaatgtttgggttgatcttggagatgcgtctcgatgggtgcacagagataagaggcgtctcatgatcatccaatttggtaaaggtcgtcattgtttgcacaaatgattttgtttctactgtttgggttgaggcgtcacttctggctaaatatgcgatttagcttggatccaaggtcgcggttcactttagggaaaaggtatttgaaaggcacgattcaaggtagacaagtaagaagcagatgtatactgatcgcagataacctatcgaaataaccgagggttcaggccttgaagcggcaaaactcctgcgggggaactgtcgtgagatccggatgatgacccctgtattagccctagtagccctagcagcgtctggggtggctaccggaaacacgagacgaagcccttagttagctttctggatcaatgatagatcaacagaccaatgagtcgcagtctagctttaaaatgcccccggcatgagaggaaggtaggagatattccatcaatcacagacgagatcacgcgccacatttatttgccaattcctccccgcatgcttgcaactcgtcattccggaccatttctagcaaaggacaaaatatgagaagtgattggtgaagcagtttccgcattccccatgtttacaccacgcgatgttagcccagttcaagcctcgacttccccgagtatacgattctccgaagtcatggctaattgcatgggtttctctgtatatgtagagaagattccccggagaatttgtggcatgtggaggtagatcttcattccccatattcttcgatataatatccactctctaaaccatgcgtctctcgccgtcgtggtaccaggtatgaagggaccactgcattgagaagacggagctcatgctttgatatagttcctggtcggtgtctttgcctctcttggatcattcctttatggatgtatgtcaccaattccctacgtgacacgcggaatctaataaattcgcagatgatctgggtgtaatcgctgaggtgctcgtctgccaatcatttaaagccaaattcgaggcagatgatacccaaacgtcagtcccataacatatggaatatgggaatatctaacgactttgcagaggattagtcgtgtctttattcacggctggcgcatgcatcggtgccggacttgcgggcgccagtggtgatcatttaggtagacgacggaccatctcattgggatgtttcatcttcactctcggaggtggtcttcagaccggtgcgaggacaattgcctatctatacagcggacgattcctggccgggttagggtatgtgatttctctcaaaacagataccccaataagcactaatcagattaattcttagtgtcggtttcctcacaatgatgattcctctataccaagccgagatctgtcaccccagcatccgtggtcgagttacggccttgcagcaatttatgctcggtattggagcgctctgcgctacatggattggttatggaacatacaccggctttgcagaggataacaatgcgcaatggcaactgcctctcggtttgcaaattgcccctgctgtatttttgggtcttttgatctctttcttccctgaggtagggtctgatttccatcgggtgaactccaataactgatgtttatccagtcgcctcgatggcttattgaccacaaccgcaccgaagagggattgcgcacattggccaagttgcatgcgcatggtaacgaaaacgatgcttgggtccaggcagaattcgctcaaattcaggagagcatcacgtttgagcatgagaacgaggcgaagtcatatgtcgagttgttgaccaatcgctcctcgttccgtcggttgttcctctgctgtgcattgcaagcctcagtccagatgaccggtgtatccgccattcagtaagtgtacaatgacttaccactgccaagatatgtcagcatagaatcaatcagctaatatgatttcgtgcatagatactactcacctcagatttatggtcaaatcggtatctccaacgaagacaccctgaagtatcaggcaattaactctatcatcgcgttggtcggccagttcctgtgcatgatgttcattgatcgcttcggccgtcgctggactctgatcagcggcaatctcggcaacatggtgaccttcatcgttgcaaccatcctactcgcaaagttccctccatcgaccaacaacaacggtgcgcattggggtttcatcatcatgacttggctgtacaatttctccttctccgcaacctgtggtcctctgtcctggattatcccagccgaagtgttcgacactcgcacacgtgccaagggtgtctcgattgctaccatgctttcgtttgctttcaacacgatgatcggccaggtcacgcccattgcaatgacgaacattggctatcgttactatttcgtatttgtcatctgcaacttcaccaatgcgctcttcttctggcttttgcttccagagactaagcgcgttcctctcgaggaaatgaaccagatgttcacgaatgcgccatggatcgtgcccggaagtcgcaaagaagattatatgactcatgacctggagcggaaggttgaggagcaggaagtgaagcataatgcgttgcatgttgactagaataggaacaaggggaaggactgtaggggacatcgttggggttgcatgtgtggagagctcagttgtgatattgagatacaataatgaagttgttacccgtggagaaaaatgttcgtaaaatcgatcggccttgtaatatgtaagagaaggcactaaaatagatgacttgagaaggtcaacaaattggatatgagagatgatctatagatactaatgagaggccaagccatgccctcttattatacctgtagagacattgcttattcaatcattaatttgatctacatcatacaatgctaagatagattttgtgctaactcgaggtcattcatggatgttgttccatcattcagaatctgagctgtatcctgccaagccaagcgaaactgggactggttttgtcgggattttggactttatttgcccctcctctgtgtctgttaccaccttgggctgtgtggcagtatttgtggtttcgggtgatgtggcagaagcagcaggtgtggcttgatcggacttggaagtcccttgatccagcttcttggtacttgaaataccagatccaggctgtttctgcgagtctttcccattctgtgtgtccttctcagcagtaatctcggtgactgaagctttacgcttcttccctgcaatcaatgagttcttgtgtttatcgctccgtctcttgcgagccagtgcggtccattcttctccttgtatgggtgcctccgacgaggttgattcaagcaatgctttctgcgccttctcgcgctgtcggcggaaggattcaagttgttccgctgtctccctcttcacagcagcctcctgggcacgtgttgactcgagaacagaatccaggaagtcgacttcatcttcatccagggatcgaaactggtttttgagacgcgatttctcttcaaaggcttcttgtttggccactgtatgataaccgaggaaaatcaccctaacatgttagccagattcccggatgaattgtccactactcttctttgttcgcgcagacgggggccaggtatccgagttgggctcacttttattgcgctccagcacctcgaagagacttttgccctcatcctgcttccctatttcggccttccgtctccgctcctcctctagctcctgctgcactctaagccactcatcgtcccgctcgatcggcttctcatttgttccggatgaaacgaaacccgatgacatagtgatcgggctgggtaaatgggtcgttatggatcacgggatggagcactgggaatggtcggtcggaatgcgaaattatccggcgacgggggtaccgatatgggacgtggggtggaccgaaacacgggatgaaaataaaagagattcgagaagttcctagaaagttgaggtttcaggtaattgtgagacccggacagttcggagaattgcaagaattggaggggtggatcttaattggaagatgtggaccaatatgagttgcatttagccagaatgctgtctcttgccctgtcacggtggaactggatatagccagtcgggtaattcgtgatcacttcatccaaggacacccaatttgttgcgaatacgacagaaatcaagagagataacgtccaatatccttcgatctaaacccccactcccccctctctcatctcccccacgacatcatcgcttgctcttggacctgcccactttaaatctgcttaccatataaagccaaggtgcctcttgatagtctttttttaaaaaattcattcttgcggctttcaaaatacagcaaaatgtcgaaccaacacaccgagtgagtgccttacaatgcaatgcaatacgcctcccctccctagccattgcattaacgcttacctctctcttcaggaagacctataccctcaacactggcgccaagatccccgccatcggcctgggaacatggcagtccaagcctaatgaggtccgcgaggccgtgaagaacgcccttctcgccggttaccgccacattgacactgctctggcttacggcaacgaggctgaggtcggtgcgggtattaaggactccggcgtgccccgcgaccagatctggctcactaccaagctagacaacccctggcacaagcgcgtcactgagggcattgattcctctctcaaggaccttggcaccgattacgttgacctctacttgattcactggcccagctccaccgaccccgaagacctgtctaagcatctgcctgactgggacttcatcaagacctggtaagtgacaccaagcatccacttccaaggttagtggggaaccattgctgactcctcatgtctaccacaggcaagaaatgcagaagctgcccgccactggcaaggtccgcaacatcggtgtctctaactttggcatcaagaacatggagaagctcctgaatgaccccagctgtaagatcgtgcctgccgtcaaccagatcgagctgcaccccaacaacccatcccctaagctggtcgcctacaacacctctaagggtatccactccacgggttactcctgcctgggctcaaccaactctcccctgtacaaggatcccactctcctgcagattgcggagaagaagggcaagactcctcagcaggtacttctagtttggggtatccagaagggctggagtgtcattcccaagtccgtcagcaagtctcgtattgagggcaactttgacatcaatggttgggacttgactgccgatgaggtgagccaactcgataacctgaaggaccgcttcaaggtctgtggtgacgattggctccccgtcaaggtattctttggcgatgacgagtaaatatgtctaaaattatgaatgttttatgagtacataggctttagataccaaaagagtcttattgacacccaaaagctcaatattattggtgaaacttgcgagatttcagaatccactgcgatgtcgtcatagtaccaaacataacataccaagcaaactaggcaaacatagtcattttggtcacgccggtggcggggcacagccactgcggagcctcgggtctgaggcggagagataagggtgtatacccgtggaccccggcgtcatcaggcatccctcctgtcttctcagcatccattcccaccatctccatcaaactattcatcgctgagacatcaccatggcaccttcagcagggcacctgctgcttcctaaattttggagggcagcacggtatgtctccccttttctgtcgccatagcgagttacaatggatccattgactgacatcctcctaggttcgcctacgaaaaggcctccaaggctatacgtaacaaactgccagagcctacacagtattatccggtgcggtatcaacccgcctatgcccgaatcaaccctcgtcagccaatcagccgtgccgctgccattcgtcaagcccgtagtcgccacttctcgacccgtgctggtgccttcaccgctgcgattcgatccggactagggggcaataatgccgccccccggaacacctctcgcattgtgtctaatatcagccgactcagcagccgtgcacctttcgcttctacccttcgtcccaatctgaccggcggcacccttggccggactgcaggaggatacgctgctggagctggccgttttggtggagctagatacttttcccatggccctgctgccccagcacaagttattcagaatgtgtctcagggcgtccgtgctttctttctttctgggcagaaagttcgcttcgacggcatcgatccacgcaccggagagaagcggtataagtcagtcagcgcgctacaggatcaggcggaaagaaagatgaatgccaacctgcacaacgcacctggctcgtacattgacttccaagtttccccgaccatcactgcactcagtgccgttggtgctctcggtaaccaggaacgctcctcgtgcgactctctgaactccgagggcctgatggatctgctctctgccgattttgcccgtgctttgaaggatttctccgcggtaatgaacgacctgaagcgtctctcgtcacttggtgatctcccgatctcccttcacgaccgatcgactatacgggtgcgcttcccaggctgtgatgcagaaactgtagagcagctgtgttgcgaggtcgggattcagcgaggccgagtcgtgcaggatgaagatttcgatattcgcactggcgctgatttggctctcttgttcccttttgcaccgagcattgcctcttcgtccgacactgactattacttcgagaaagccccaaagttgcaatcgcagtatccaccggaccttgactggcaagggatgatgacaccagaaagctgcacgccatcgtcaccaagtggcagccgtgattcgggcaatgctatcagtttcgaggacagtgagctatttggtgctaatccatggatatcttcgaccaagagctactctagtattaacatcagtgagcttggagatcagcatttcttcccggaaatctccagctctggtcaacccgacagtaactctgcatatgaaggtattgagggaatttacacgttcctagctgagtgcgatcaagccaagcgttgacgaacacactcatattgggccatacttttctactattaatgttttttatctctcggggttttttccttttcctttttttttctttggtacatatctcaggctgagaccgggactatatacatgacgacgcagataccactccactctttaacacacttctttcagtgttacacttgctcaattgaatgaatcagattgaaacttgcttgttcgctttatgtcactggtggcctagtacatcgaggaccggtcagctatagaagcgattgatttctctcaatcctctttggcttttcaaaatagccctagaaatagccactcatgtcatttcagcctgcacaccttcgtccggcctcttggaccattacggcctaaatgattgtttcatataaagacaggccggctgaagaatgcgccacggtgcggggtccgggggatgtgaataatgtggcttgccgaaaggaaatggcgttttttcttggcttggacttttcattatgtcgatatgtcaggtctctggagtaatccgtattctattgcaatggattctcgaaattcttcctcctttgcctgggcgaaatcagcttgttttgacacccttcctgcttctgtttgtgattttgtcttagggaaggatccttatgcgctatgttagcagtcgatcacagacgagcagcttaaccttacaactggcgcaagcctaatatggtcctcccgcgccgagtctggggaggatcgacgatgagtgtctcgtttggggacgggggatcaattccgcgctgatgccgggagtttgatattacatcaaccttcctctccttgactatctaggcaattaatattagtttcaaggctacggactatttagtgcgatatgagctatgtgccatcgaacccggatgacacaggtttagccagatttaaccacgtgttagggcagaaattgcttgtatgccttctctgttatacatgtgtgtcttggcaatgtctggaaatggattgaacggagatagttctgatctcttatagaatagcttgatacaatgtagcgttggcttcgggtttccggtttcaatcccggcaaggccaacaaggcaatcttgctggggtatataaatttatcgaattctcccacaactgttaacaagatcacaggaaaacgagcaaaactcgaattcattgtttcaagatcatcaatatgcaatttcttcttcttccattcgtacctctgctggcttcttccgcagcggcagctgcaatatccagcgcagctagtccagctgtcaccgctgcagcttctggaaatcccttctcagggtaccagccttatgccaattcgtattatgcatcagaagtctcatcctcagccttgccatcaatgacgggggctgccaaagccgccgcaagtgcagccgctcaagttccgtcctttttctggctgtgagttcattgcactggtattatatatccctcgggcaaatactcagattgccttatagggatactgcagacaaggtaccaacaatgggcgagttcttggccgacatcagggccaaaaacaacgccggtgctagcccaccgattgctggccaattcgtcgtttacgacctgcctgatcgtgactgcgcagcattggctagcaatggagagtactctatcgcgaacggtggtgttgcgaattacaaggcgtacattgactctatccgcaatgtgttggtcgaatactctgatatccagactatccttgtcattggtgagtataccttgctgattgatggcttcccgcacggcaatagtgattgctgatattttttctagagcctgatggtctggctaatttggttaccaacatggctgtgtcgaagtgtgccaacgcacatgacgcatacttggagtgcaccaattatgccgtcacacaattgaacttggccaatgttgccatgtatcttgacgctggtaagcatctttcctcggtcctggaaggcgacaatccccttgcgacaagtaaaacagcgagaattatctttatttctgtttagccaaccgctcagttatgtcattttatgtggcgtcatgagaataatgcagccatctctcatctgtatatgcttactattaacataggacacgcgggatggcttggctggcctgctaatctgagcccagcagctgagctcttcgccaacgtctacaacactgccaataaacctgcagctctgcgcggacttgccaccaacgttgccaattacaatgcctggtctctctctacatgcccatcatacacctctggcgatgccaactgcgatgaaaagaaatacgtcaatgcccttgcgcccctgcttaagaatggaggttgggaagcccacttcatcactgacaccggtatgtaatcaagaaactttaaaacagcatcagatcaatcaccttcttctatgggtcaaagatctcacgctgaatgttttggtacaggccgcaatggagtccagcccacccagcaaaatgcatggggtgattggtgcaatgtcaagggaaccggattcggtgttcgaccaaccacggagacaggtgatgccttgaccgatgcctttgtttgggtgaagcccggtggtgagagcgatggtacttcggattccagctcggctcgctatgatgcccactgtgggtatagcgatgctcttcagcctgctcctgaagctggcacgtggttccaggtaagagtgccccgattgaaagtgattatttctacaacactgacgacttcgcaggcatacttcgcccagcttgtagagaatgctaacccgtctctttaagtctttggaatcggcaaatataggttccagggctagcagctacccaggcagcgaatgctgtgctttgtgctgattctctgtgttcccatttgatagtacctctgccgggaggcttagaccaataagcagatgaccaaatgctcataagattctggatgatctcgaggctattcccaagatctattgtttgccagcatgtggagtagatgactatatattcgactatccattcattgatgaagatgccatttatagacaacgtcgataccgccttcacagttaggtgtgcacgtgcacgggtagatcaattgccaaaaggcggtctgaatatcaagcagtatcctgaccgcccggtaggcgaagagcatcgataacgaattgcgggatatcttgtccactaccacttccacaacttcaacttgcgccaatcctttgacagagcctcttgttgttcttgatatcatcagtgaatataagcccatctgcattcctcagctgtgcagctttgggtgcttcagtgccccgggcgtaatcaccccacaccaacactctgagagacaaagagcgagagtgcacaccctgtcatggaggacttcaatagtgaaactgatagtgattacaccagctattggcgagactgggtaagtgaatttcttttcatcgcaatctgatttcccttgagaagtgaggcgttacggctggcgacagggccaccgtgggttggaatcgaatggagcacagcgaggggctgccgtgacccggacaaatatcgagcttcgtagcgtgttgctgcgacgattgtgacttgacgatatcgtgtctgtcgtcctggcgatatgaatacagcctgccgcgacacaaataccatgttctcctctccaatctcttctccttctcacatttgcatcctgttcggctcttatttttgctttactggatttccacttcatcatggtgtcttggctgtctccacaagttgtccttttcttcgtggtcttcttgggcggcgcagcatctgcgctgttccaacgcgcgtcttggtacgcggaccatggcgatatggattcttgtttcttgtgtgtatcgttcgcgatcacttcggtctacttttacgtccatttgctctgcatttacgtccagatatcattggaagttgatctagccaggtttgatccaaatgaccccaatggtccccgcggctctcctggctcggattttaaccccggtggacaaaataaaccacccagtggccagtcaccccaaccttcacggcgtggccctgcgcgtggagggtcttccacgtcctcgcgtttctccgattcccctctgtctagttacagaagccgtgcagtcttattcatgattatgctaatcgcaatcatgtatttgcagtttgtctcatcccgtggtaacgaatacttctgcgagattgacgaggactacctaaccgatcggttcaacctcaccggtttgaacaccgaagttccgtactatcagtacgcccttgatcttgtgaccgacgttttcgatcttgatgccgacgacgatctgcgtgagcaaattgaaaagtctgcccgtcacctctatggcttggttcatgcccggtacattgttaccactcgtggtcttgccaaaatggtatgttgaaattcggaacttgtgtgcatgttgtttcccagacgaaagtactaacctccgtgcagcttgaaaagtacaagaagagcgacttcggaaagtgcccacgcgtgatgtgtgatgggcatgctttgcttcctcttggcgagtccgatcttccgaatgccagcaccgtcaagctgtactgccccaagtgcgaagacatctacaacccgaagtcgtcacgtcactcgtccatcgatggtgcgtacttcggtacctcgttccactccattcttttccaggtctatccggccctcaatcccgagaagagcagccgtcgttatgaaccccggatctacggcttcaaggtgcacgccgcagctgcacttgctcgataccaagacaaccagcgtgaggatctcaagtggcgtctcgccgaggtcgatatcaaccacaggttcatcgaggatagcgagagtgatgacgatgcattcgagtacgacgaagattatgttgaaggccacgtggagcaagtcaagaacgacaagctcttcggtgatgcagcttcgctcgcatgaatgtcgccaagtactcttgagtgacatggattccattcccatatttcacgggcaacatttcggcgcaacgagggatacgtggtatgcttgtgcttttcttcgggtgttttcacgaatgacggcgttcggtagatcgcaaggataatttgcgatggttttttttttctccgacttcgtttgtacctatcacctatctagtccattcgggactcaattgaaaccacatgactcaattgaaaccacataacttttatcagatctcttgcaatggagatggttgctaggtttatatggccgggatactaagagataataagtacacgtatattattccgggtactatttgcagccgccgcttagaatgttgaacgattgggtacttcctcagaactacagagccagtcccatttcatgcaattgttcgaatgcaaacgtcaccgcgcgagccagttgctcgccgttctcccatgcctcatcatgagcaccggtgatcgataagatgcgaacccgtctatcacaatttgaagcttcctgcacgggtatctgtgcctctgccttctcccagttcctcaaggtcttctccatgacctctatctgaggcgcgtccaccaacccatcgtccttagaatacgccaggacaaccaaccttccagaattccacccgccttccactccccgagagccagtcaccttcgccggcgatacttcatcccagagcatctcatccgccccaaaggccccctcaataaactcctggtatgccgagatgtcagcatgcgtatcccgcagcagtcgcaggtcgtagatacccgccacactgacgatggcagtgggttgcactggtgctgtagttggcagggaaccggaagggccaggtatagcgacggtctgttcccgatgaccagaaaccgtgcccatcacagcttggaaggccagcgttgcgccgcaactgtggccaaccaggatgtatcgcgtaccgaacccgtatgtattctggaggaatgagagcgctgcctctacatcggtgatgtggtcagggtgtttcgcattctggaaatccttcggggcggtatttgagtcttgtgggtgatttgggtgagcgctgagtcggtacgagatcgaggcgaatccggcaatgggtagatctctttcgcgaagtatagattccgctgcactgaaagaggttgatgtaaccgctggatcccgccaggcaccaccgtggatgaagctatagaagtacaccaaacgttagtattgctttcggataggactgtgatggggacccgtgtacatcacccagtagccatctttgcgtggagctaatgttgtgacggcaatactttgtagattatggtcttggccatagacaatagtctgtgtttttgagtgatccgacatgttgccttgcggagttctacaacatctcttgatttatggggaagtgggacatgtcgatagattacgggcaggctaggagctgttgccatttgactgacatgttggaggtaaaaattagcttcgtcttccaatatccgtcacaatgtcctttaagtcactttgttcgttcttcttcccgtctcatgtattgtttaagacctctggtcgaatgagaattccccgatgagtccatggtggtgtaatattactgtattgcccctccatctacttagtggaaatctgtaacatatttcgttgtgtattggtatcacgctaagcccaatcaggaattaatggtccctttcacacaaaccctccaagtccaccgtctcgaccttaacaaccgcccaactgttgcaatctttcacaatggccgagtgagtgatggtcttttttgatcagcaagaacatgatgctgaccgacttgcagaattccagtccccctcgcggccgttcaggtcgaggccttggtatggtctccccgacgaaaatctcccccagtcctcgccagccagaaatactgacgtcgggtattccaggtggtgatgaaaatcatcaagcactgctcccagaccttcccctccactgcaaccggcgcaatcgtcggtatggatgtcgatggcaccctcgagatcaccaacactttcccattccccgtcgtcgaagttcccgccgagtcgcactttgacaacgccgctcccaaccccgccgctgccgctcctcgtgctaaggcaaacgccgcgtactccgcagagatgattcgcatgctgcgcgaggtcaacactgatgccaacagcgtcggatggtacaccagcgccaacatgggcaacttcgtcaacatgaacgtgatcgagaaccaattttactaccagagccagctgaatgagcgcacagtcgcactggttcacgatgtcagccgcagcgcccagggcagcctcagcctccgtgccttccgcctgtcgtccaagttcatgactgcgttcaaggagaacaagttcacctccgaggagtacgtgcaatgacctagtcgatttataagattatatgagcgacatgaatattgacagaattgcagcctccaaaagtccaacttgcgccaccccgacatcttcgaggaactgcccgtcaagctccacaactcccacctgatcactgctttcattcaccagttgcagtgcccgatttccacagcttccactgagctcccttcctccctggctgcccttgagtccagccccttcagcaaaaactccacccttacccccaacctcgacaacctgtccctcagcatcgatcccttcctggagaagaactgcgatctcctcctggacagcatcgagacccacaacaccgaggtcaacaactaccaatactaccagcgtgtgctcggccgcgagcagcaaaagatcaacgcctggaaggcgaagcgcgcacaagagaatgccagccgtgccactctcaaccagcccctcctccccgaggacgagtggcaacgtctgttcaagctccccgccgaacccagccgtctggagagcatgctcaacacccgccaggtggaacagtacgcgcgccaggtcgacagcttcgtctcgtccagcacgggcaagatgtttgccatcaagggcaacctgctgcccaacgaaacctcgaactaaacgttgatgattgcgaaggggagacacgacgcttctggtattgcatgacctttttacggcgtagggagggaaaatgttctctattttggatgttaatatgacttcctgtttcttttttcttctatgagcggagctgagtctctgggaattatactcctgctttgtatcgacttgtattcgatcatagaaggaaatcttattttgtttagaatataacaaacacattgaacaggtcaatttctcatgtaccttttttttatttcaaaaatagcataatctgtggatggaacaaagtgatctaagacaaatataaggttagattaatctatgaaatcgtatatctatgaatactcacatgcatgcatgcatcataactaccatgtgtctggatgactccagggattttgaatttccaagggaactgcagcctcaagctcgtcggcgactctgagtacacagacgggactaatatttcccaacagggtggcaatcgcagtgtagaaaataggctgaagagcacagcaagtccgatggaagagagtgtcaccaacaatatccgaagcctcgatgcagccaggcgtcatcagagaaagctctctaagcttctcagccacctgaaagcgaagaccgggcttagatcgaagctgcatgatctgggcatgtaaaaggtcgaggaagtagctccggtccttacagtagatactgtcgggagcagggatatccatggtgaagggtcgatgggagtgatagagggggagtatggatatgtgggatccgtgaagattgtgttggagacactgttgcttggtgacagaatttcgaggtgggatggaagctatttatacagttcgaatagttgacttcaaatactcgatgaagcacagctcgaaagatgagaacaatatgaatgtaaaagatcctttgtttacatcttctcttagttctcggatcaacttgcacacgaaggccattgtactcaagaagggactagacaaagcaaaaagacattggcttttacaaatatgaagaatactaggcattgagtaatttattctcatcaggaatcataatatacagaggcttgtcatatagttgagcaaggctattgacacttcgaaggatgacatgatgttacttgatttgatgttacttaatatactatgtacacatgtgaaaatacaacggcctggtacctttccatccctgactagcgatgtgtcgattaatatttattctgttcctttcgccgatcgtatgtctcgactaccatgcttccccagtgagcttcaatggaaggtgaagcaaccgataaccgaaattcgttggcgaaggaagtcgtcccgctcgaatgttaatctgcaaagattggtgaagcagcctgggtgctgccagtcctgcatcacgttcctttcgcaaagtcacaaactcttcttcgctgataccatctttcagatgtttattcagcttcttgtgatcctgtacactcacccaaggaacggggtcactgcgtccctctggtggataatcatgacctgtccagatcttgaagtggtcagggaggcttagaagcttgcggcccgaacgaaagaggtcgttggcatcgccgccggggaagtcacagcgtgcagtgccgatgtccacatggaaaagagaatcaccgcagaatagattatctggtaaatcttgttagtaattgtttaacgaggtcattattgttggttgataatcacctccaaccatgtaaccaagatgatccggtgtgtggccaggtaaatgaatagcctttcctctcaggttcccaatagtgaaggtctcatcgtcgtcgaaaagtacgtcaaaaatgccttcatattccactggtggaacgccatatctttcggcaaacaatctttgtactttttcaatacgcttaccaatgcaaatgggcggcttaagattttgatcctgggcaagacgtttttgaaggtaagatgatgcagtcaaatgatccgcatgagcgtgcgtttcgagaatcttatcgatcgtatagccctttcccttgataagagaaagcagggaatcggctgcgtgagtagtcacggcctgagtagcagggtcatagttcaggactgggtcgatgatgacggctgttgatgttgagggatcggcgatgagatactgccatgttccagatgtgggttcaaagacatcatgaatcacaggctcggtatatatagtggatgcagtgctgtatgtgacttggcgtgggattagatgtttggtcggggtagagaaggaacgaggcgagaatgggcggttccagctatgaaccgtctgccctttttgtgattgacgcactgtccccttgattgaagcgacgtttctcgaagattttgcggtatgagatacacttgtccgtgtcgctttttggatatgacgcaattgtctcaagttggccagcattgaagttccaattggcctgctagacaatctgaaaaggtctgacgaccattgccagccgatgcttgatgattgctgcttgaagcttatcatgatattccggatttgaagaacaaaatgtggtgaggaatgtcagagctgtcgcggtggtcatacttgaaaggcgtgggtcggcgactcggcgagcatatgggtcgccgattgaaagagtcatcacaactccatgttcaaggtttcttgcacggactatcgaattcgaggaacatatgatgttgttagcgaagtagattgatttaaatactgttgctaacgcttcaatcccatatgttaaggcgaatcaaagtctataagaatcgaatccgtatgcacgaccgcagtcataaagtgagagatagagagatactgagacacttcagagtccaagaaggacattgaaacatatctgaagtaaacaaacatcattgtaactactccgtaactacggagtactttctttcacctatgggaaccccgaaagtattcggcgaagaaaggccgaaactccccgatatcggaacgagttaatccgaaaatcacgacatcataagatcagctgttttaactacttcagggctttttttttgtcacattttgagccttacattccaagatgtttcagcgtcgcacagtgcttgctgccaagcgctctgtcgctcaatggaggagtctcgcaaccgcgtctcccgtgagctctgcgcgaaaccacaaaattgtagtggtcggcggtggttctgctggtctcaccatcagtcaccagctgctgcactctggcaaatttgcacaagatgatattgctgtgattgatccagccacatggcacaactaccaacccggctggacactggttggcggtggcctcaaggacaaagaggagctacgtaagccattgaaaagcttgattgatcctaagttcaagttttataacaatggtgttggctcctttgcccccgctgaaaactcgctcactctcgagaatggtgacaagatcaactacgagcaactggttgtggtgcccggtattagcatcacctatggtgctatcaagggtctccctgaggctcttgcagaccggaactcaaccgtttccacaatctacagctacgacacatgcgacaaggttttccgcaccatcgaaaacttccgcgaaggcaatgctatcttcactcagccagccggtgtgatcaagtgtgcgggcgctccgcagaagatcatgtggcttgctttggaccactggaaacgagctggcctctacaaccctaccagcccctctgaatcacccatcaagatcagctttgccaccggcctacccgtgatgttcggtgtgcccaagtacagcgccgtcctcgagcagatgcggaaggaccgtggtgttgagggattgttccagcacgatctcgttgccattgatggcaagtctgccgtttttgcttctcctgagggagaggtcaccagaccattcgacctgttgcacgtttcccccaaaatgggtgcttacgccttcgtcaagaacagccctctggccaacgaggccggatatgtcgacgtggacgataacaccacccgccacaagaaattccccaatgtctggtctgctggtgatgcttccagtttgcctacatccaagaccgcggcagcagtcacttctgaagcccctgttctcgttcgcaaccttttgcaaagcatggagggcaaggaactcgatgcttcttacgatggatacacctcgtgcccgctcttgactgagtatggcaaggtccttctcgctgagttcaagtacggtggagtacccaaggagacattcggaaactggtttggtatcgaccaggctgagccccgtcgttcgttctggtatctgaagaaggacttcttcccttgggtgtacttcaactacatggtcaagggtaactggggtggaccgaagggctggctataggccgtgtacattatccctatgttgcaatacgatggcagtacctcggggttttttaatcattaggggttgtacaaaagaaaaatgaaatcattgagcaaaatatctcgacagtcctaagtgcgttcagtctaatacaaagttaacttgggtggatatgcacgtgaccatatcaccaatgacatcatagctcatcataggtcgttatcgataactcgttatcgatcagcgagtgaatctttagtggaattcttgtcttgaattacattcttctctttcgaaatttaagtcttcgacatgtctctaggatagaaatctgacctctgttgctctgcatctctccatgtacaacactcattccgatatttgggtcgtgagtctcacccgatcaaagcatctccagtatactttcctattctcaccactaactggtcatattcctcaataggcaggcgcatttgccgcactcatagtcgattttatcgcctaccccttcgacacactcaagacccgtgtccaatccccagactatgagaaggtcttcaagaatgcgcgcacaggagcagtgcggcgcaatgtactcttccgaggattataccaaggtgtttggagtgtggtcttcacaacaattccagcttgtatgtgttggctcttgttgatgaacagggaactaggaatatcaccactaacgatcctatcaacgacaatctagctggcgcattctttaccacatacgaagctgtgaagagcattatgtacaattcctcaaaagaagcatccacgagcatgaacggtggcaagagaagctcacccgatggctctttgaacagtcttcgcttgcccttcacacattccctccctactccaattatgaatgcaattgcctcttcggccggcgagatggtatcatgcctcattatcacgcccgcggaggtactgaaacaaaacgcacagatggttcaaggctcccatgcggacaaatccgccatgcgacaagtaatctggcgattccaacatcatccttggcgcctatggagtgggtatacggcactgcttgctcggaacctcccaaacacagctttacaatttccactctttgagtatgtacgatcacacctgattaaccgacgaagacgattgaaagcgactcggatgaacactggtcaaccaccatcggaaatcaaggatcaactagtcgaacgggccggcttgacgggtatagctgcggcaatttcaggcacgatcgcggcgacagttactactccaattgacgttatcaagactcgactgatgctttcggcaagtgatgctgctagttcccaacataaaagtactcaggctggtactcggggcaatgaggcgatatcttcggatgtgcggaaaaaaactaaacctggcaagactctcatttctgtcggtcgtgatatcatacgatatgagggtgtccgtggtttgttcaagggcggactgatacgggctggttggacggcgattgcactaggcctttatctcagcctgtatgaaggagcccggttttatctagagaatcgacggaaggagcgcgagcatgtcagttagagacttggaaagcaagctggtggcggggatgaagggatctagtgagaagagcggtgttaaagcctttcgtttcgctgccgtctcagtgagaatattcatggctactcgactcgcaaatttccatcaacgaccctagaagcccgggcttggaaaaggatatttctttgttttctaaggttctgatgtgtccctttgattccattttgaagacaaagaacaaagacgggacctcaactttgtgaagcacattgtatttagtctcccgagactgttctggataaagaacaaaggtaacaagagcagaaggggtgtctttgagttcaggtagaatagtgtgaccaaggcttcaattatataaatcatattcccaccttgcacgtaatcgtaggtccatcccctactagtgtgtttcgattcatctattcaatccatttaagcgattacaagatcgatcatgccaattccatctggacatcaaggtctggacatccctatgattaccgacgaagactgggatgcagatgacgaggactctggttcagatactacttccgatagctttgacttggtgccgatgtcgacggcactgaaaccagaagataaagtccgaggcttatgtaccaacccattgtttcatttcacggtccaccgtgaagaacatacgtttccaggccagtgcggtaaatctgatggctggattaacacatctcattttctctggaccatgtgcgctacactcgcggattcaggaaccgatccggaatgggcagcgacattcgaagaatggcgaccccagtggaacaaaatccaggcgcaggtgaagagattcggatacactcacttttcttctgagatcgctcctgcaccggttgatcttgtgttggtccaattctttggatgggggtatagtggagaacccagagagttcgagattgaacaggaggacccagatagtgtctatgactgccaggatatgtggaccttttggcgatacattattgagacgccggcaagtcagattcgacagattgttgtttgcctcaaagatactgcgaggcttgttggctctgagtagaatgtccgtaagatactttgagaatctgcacatgtgagggataatccttgccgttgagtcaaatttgtttttaatacttgctcataacccacccctcttccttaaatttcagtaccgccttcctgatcttagtaccactcagaattctgccatgccatgtattctgcctacttctggtttatatagtaaaaagacatgcatttcgattagaaaaatcgtatattctacttgatacctatagagttaaaccccttgctggataagcagttaataaagcagtttatgataaagcagttgacgatgaagcagttgatataggatatgacagaagtgacttattttttttagttgcttacatacaaaccataggtacctgctgtcttgctactatcatatgccgtttggaataaaagcggtaactatacaaattagggcgcggtactccgtaagaagcaagtgtcgaggcaggtgctcaaccaaattaggaaggcggtactgaaaattcaggcaagggggcgtgtgagcatctaagggggtatgagcaacaattccctattagtatctcaccaaattacgatattctcacgtaagaagtatacgagtgatctcgacggccgcaggtcggcgagatagtcgttgcgtacgtaagactctctggtttatacttgctacgcctcgctccgcaattatctgatgcctagtcacatacatgttccatgtgcttatttatgactatgtgtaccggattctccctggtggtgggggtttcctattcgggctgccgccgctttatgagagcgctcagactcaggctctcagagtagatatcatcatatgctatatgtttgcttgcttgcttgctagttggttaacgtaattcccggccaagctgcgcagcccaagacacatagtaaaagcgataaataacaacatgatatttcaacaacggttgtctacatgagcttttccttctagtctaatgctttttatatgacatcttgctacttattgggtttaggaggatttgataaattaatgactgagatatatatatttcaagggttcagcgacatagttttcgataccataatgatataagttctcgatttattcataactgggatatgatactaaaaatgcttatcaattgctatcggcatataatggaaatgaataagagcgttggttgttgagatatcatgttgtaatttgtcgcttttactatgtctcactcggccgggaattacatttaactcacatggccgcttaatcattctgttcataccgccttcctattcaatacttaagggctttaggaagcctcacgtgtacatacgccttccttcgccgaaagaaatgcccaacctagagaacctactggaaattatgtttacgatcgcaaatgaattgaagaagacccgagacattaactcattggttcgagcaagccgttatgtgttacaatctgactgcactcctgtatcgcactgaaacgttcggtcattctgaagtaaagcaggccttgcttgaaagcgctcagattggtttgggttctctgaagccggtcccggaagggtggcaatacatccagaggatttatcggaccatcccacccaaccttcccaaagtctccacttcacacctgagctctagtaagatgtggagatcataagttcaattaagaaacccatgaatgtatgaatgtatgaatgtcttgaaagtctcaacactatgtagaaaagtcaaaggttcttgaagagatcgactaccagatgttctgccatgatgcagtgtaaacaaatgcaactgatacaaccaacaaccacgaccatcatgcacgcactccatagcatattagttgagccagttatccctgctgctaagagtttttgtgacacagaggtgtcaaaaccgaatttattatctctcatacacccttccagggaccagggtcgattgcgtatcttctacgttaaatgttcgttcctttcgttcgcttcacctatgtttccgtgcgtgctgcactgacttcctgtatccagcatattctggtacatgggcttgaacatgccagattctttgttgccagtaatccttctatcccatgaaaaccctacttctgaagagaaaatcccggtcaatggaaatgtgtctagatacgatatcctccttgtagcattccacaagccttataacgatagaaagacactcgctacggctagcaccgtaaattgagaccgggaatgatatgcaaaatcccctcccctggtgtatgggctcagagtcgactgtgaactcgccgatttggagacgttcaactgtaagattcatcaactcgtcatcggaacagtggcggtccctgttagaaaatctcaccgtaaaccacaaggtgcctcggaacaagccatactcatcgatagtaggaaagccttcacggagaaagacggttcgagtggaatgcatgttatggtcctttgacagtaaccccagacttggaaatggctaaccacaggagtaaatattctgccagttttgctagataggtgtttgagcagccggaggaaaaggtaggatttctttttgttctgctaagtctttcatcgtctagccttttattttgggatgtgaaggctttgttattgtatccttccatcaaaagctcaaggcgagaaaataggttcagagacctgaaagtcaggcactacaacaaaggaaggatatagactttgttctcattccattcaagcacaccataagccagactatataaggtcccaatttaccttctttttaggaatattccatttttccagtccaccggagactttcaaactaccaattttcactgcggatattatccaccaccaacatggttgaaccaaaaaaaaccatccgatctggaaaatcctctgttgaacgacctaataatgggtttaccactgagcgctcagttggcggcgagcgtcgttccatccgccactaccacgatggtcgactatcgcaacgtgagagtcctgtccctggccctgtccaaacactaatcaagaccaatattatgtcgaagacaaaaagcactagacctttttccaagctcagggaacaggaaccggaaccggaaccaaaactagagccagaaacggaatatgaatctcctactctcgccgaaattgagagactctccggtgctgttgctacactcttccacccagaccgttctaacccctctgagaagcctcccccgaggacaatgagcccacagtcatggagctccgagagctcatatggcatggttactccacccttccctgtagcctcccctactcctggagattcacccgaactcatgagcacagatgtgcttctccctccagcgactgctaggtctgatggctcagacgatgatgccgacagtatttcaaagaagtggaagaaactgggtggaaagaaacgcattggaagttcagatattcacgactaactggatgtttaccaagaaagattttcttctggcgacgtattatacatgtaggaaagtacaacgtagacatgtagataggtacatggcgggacccagaggactagactaccatcgtacgccattagtaccacagtggagagccaaacttgctccagaatgaagttgaaacattgaaaattgattgccatatccaaattaaagaatgccaaggataataattggcaaagtgagcaactcgatcactatctggacaaaacacttcttcagatgaagttcaatcagccataaaaactgaggaacgccaaaagacttcaatgaattgctaaatgcagcaagtcctgaagggattctgcgtcctccaagtatctctgcaatagttgatccacgtttctttgtcggagaaggaatgattgtctccaagttcatcggtagaaggctagcttcggtcattatgagagtgatagatgctggcagtagtcctagcaaacggaatgcaagcatgatgatcactgcaaaaacctcgacactagcgcgcctgctcgtggagattggcatttcctcgccggaagaaatcattgacctctggattagactctgggcttcgtacatcaaggcttggcaaatcccatatgtgaaactagggactgccaagtgtatccatttcctttggacttcatcttctgtcaaagagaagagtcgaagtcgatgtgctgagatagtagcacaagtccagatcaaatgaagtttgcacagcagaacagaggaacaggcgtatgcaaatggtatcagtaattcgtgtcttagaattgcgaattccaagaaagatctgatcgcataatgagtgacctgatagacaaggcctagcacaagcgcataggagaatgtgtgaaggctctgtgtagtatatatgagatgtatggccttgtaaatggatcggaaggtcggaggtcgcttgttccccctttcttgatctgacaaagccccatccgctcgagcaatctcaacgatcaaagatgtcgctactacatggccaagaagataacgaaccttgttaaagatcgattagaataaattatagggaagatggccagacgaggaacttaccaagccggaaagcaaaagccggctagaaatgagagcaaaagaagaaaatgtgagctctttgtgtatggtcgtagaaagggaaatttggtcaagcagatttccatctcctcctggactgatcagaatgttcaagacccgcgaaggtaaacttgcaaatacggcctgactcaaagtgagaaacattccaaatcgtaattgatgggaaattgttgcagcgaggagattcaccgaaggcagggtcgcactacactctgacgataataaatttagaaagaaagaatggggaaaagatagaattgggctaagccaacgttcatcggttatactcgcacggtttaaagtcctggtcgatgtgttactgtttgcattgtttacaccatttgcactgtttgtactccatcaacactcccatcctaatgcctttccttttttctcttcctcgacacttaaattctttatgaaatgcgctctttcctctgaggatctggcagataacagctgagggtaatctttcactcaatctgactaatcgttcaagtcagtttcttcctcaagcttacataggggtcaggttccgaaccctgaccggataaacctcgggattatttatgttgtccaataacaatcgccgtccctcaccaaaagaagccctgccaagaaacccatgtaagcagctaagcattatttaggtacagagcggtgctgcctgatgtgacctcggaatgtctagcaaatcccgacaacccggtctgtcgagagtgactccacaggactgtcaattgaagatcaatcaccaatttaggccgaaatacagagagagcattgcccaagcctggagtacctgcttacatgtaagattcttcgaatccttccaacctcgagtttgtagaagttcgtcagcttactgggggcctctatttcgagaatagctctcccaaaactctgactacccagagatccatggacacgatcattcgatcacgcggcatgccaaacttgaacgttactaaacaaacactgccgaaaatctataacgcactttaatcatgcatacatgccctgaggattgggcaaaacagtggtaatatagcataggatgaattctatgcattcagggggcggcgatactagtcgcactaaatcaccctagtcaggaataaaatgaattctgacattaagagcactagggctgacagctccgcatgacgaagtaacattcctatggggaccgaatgtccacaagtgctaatcagcataagctcaacggaaaaggctcatacgatctccgtttctgctcgtatcgaggccggagaggccacatataaaaggctcattgtacgcccacatagagcttcacaaagaagaagacgagaacatcctgtccttgatcaatcaatcaattctctgcgccgttcttcccatccaaattccttctcctacaacacgattcggtatcctcgtcccaaaacaatgttcaagaggctttccatctctgcctgggccattgcggttctagccactaccgcgcaatgccagcaactcagctatgaagatagcattgccgctctagcgtacggaaacgtggccaccgatacctcttccgcgggcgaagtctggctcaacgtgactgggtttgctgtggaggagcttccacacattcagagcgatgtgggaattcacacattggacaacctcgagacactcactgctattgctggccttgcacaagacgcggcgaagagaggtcagtggggagacattgtctacttgcatagtgctttcagcatgaatggccacgtcgatcatctcaatgtttcgagtgtcgagatgcaggagtcactcctggaggctgttacaaaccggaccagcggaaaaaccgactcccctttagtcgagctttatgccaatacctcgagctcgacattcttggctgaagcttttaagaatctcaaatcagacgcaaatccccaaagaaaacgctggactaaagaagcttgttcaactgcccaccgcgctgtcacaagcgcctgtcgaagcctccttggaaatatcaacgacaatgccacatggaagtcaggcggtcctcggaatatctgccaatatggttgctgcatcagttggagtgcgaacgccactttccagctccagaatctctcaagtgctggaaactattgcgtgaacgcgtgtgcttcgagcacagtcagttgtgagatatatggtgtcacattgcaaggaactgtcgtggatcaatgtttgagtaacagagcaaacggttgcacgtaatgagggaaccaccatgacctcattcgaagcagatctgcccgaagacgggattttcctatggtctattctcaagggttgaattcaatgactgagtttcttgttggtttcttttcttttgcggcatttacttgtgatgcattctgacgtgctcactgtcgccccatgcagtttgtagacctctctgtgtggcattcctttccctttctctttctattctctggcagacagctcaccggcaaacgcgcagcttgccgcgtccgcgctttcctttatatgtctgcagagatacttcttctgtgttcttgtggatggaatctggctggctttgtggtacgaaactatgtaaatagacttcaatacagtagctagtttctgatcctccatgaatatcatctttttgcctctggctgattattacttcccttgtagtcaggacctttcatcattatcttctgcggtattcacttgtgtatgtagtatctcatccattgaaattaatatcgctccggcaacttcatgaagccgctcgggtctttctcatcacatacacccctccacagagtaacttatatttattttcaaggctccctaaagggcctcacctaaaaagtatttatctaagcaaactaaaatcctttctgcctgaaaaacagtgcagttacatgactaagcgagctaagtgtcccccgcaggtagattttcattatgttcgtgatttaatgggatcttatctggacgatcttcactatttccccttccctgtattgtctttattatctctattcgaacagtactgtggaggcgtcaatggcggccccggcgatcatgctatgatcgaggaggcagtgcgactcaagcataccaactcttttaaaaactgttacactatgtttcaaggcgacatgtatgccacatcttactaactcatggctaaagaggctctggctatttttgaacccgcaatccaagctcgtatctgtgttccacagtcagtcggagaatttattatccaaaggcagatctacaccttgcaaaccctcaatattctcattgacgatattctgagcggctcgcaaacacgaattcaaaaggccccaccaaagaagaagaaggctactgatgacggagcgacagtggctatgtcgaggctcagtatcaagggcccccaaacgcggcttaggctttccgacctggtcgccagggctcgtgatcaccaagacacacttgaagagtactgggtttgctacccactgagcctgttgtgcttgctcatgctgtcaatatttggttctttagccgcccagaactcgttcccgacgaaaagggacggcgattgccggttcacactgataaatacatcagtgctgctgttcttgaggctatcaacagttcgatccaaggagccgccatctggaaatacattgctagtattcttggggtgcttgacaagtgtgttggggatgatgcctctcgagttgttctcctccaggagatctccaacatatgtcaagtagagttaaatcgtgcgcaaactctgttcaagcgacatgttcagagtgcaagcggctctaagtggttcaagcgaactgccaatgtgtatgacagcaccggtagccggcgcgtttctataaaaggcaatctggaagaccttaccgtatctgacccccagctccattacatgttgcgtctctgccagccaaagctcaatgtttccaccgccactacctggatcaaaaaactgggcgagtatcaagaagcccatcctagggagagggaaaatctggaagatagagaggctgactcattgggtgacctggctatcatcattggatttatccatgacttgtcctctgtgcttccaattccttccttttccaacaaaaagggccagatgtttgccgctaagtcacaggtggtggaatctgaattaaaccagaccaaggatcaactcgacttgctcgattacgtcgttcccatcgataacctcctagaaccgggagtgcccagtgaagctttgaaaaagctagaccaattcatcatcgaaaaatccgggacaaaattaggattcttgtaccaagacatggttgccgactgcctgtctggcgttcaggctcaatgccttgaagccaaagaaaaagtggcgcagggctagaaggctgaatttccttctgctccggcaacgaccgcagagtcgacggcattccgagtcgaacagcggaaacagaaagaaaaaacgcgtcccgcacattcatccatctacgacattgttacgcctgtgaagccgtcttgtccacaggagccagcttcgctgctgcaaaccttcaagatagacgattcgacagcagaggtcttctcgagactgttcagcaaatctcaagcacgtggcccagccgcctgggcggccttcgccgaggcgatggctaaattgggattctcaatctctcccaaatacggctctgtttacactttctatccacccgacagcatgacggcgaagaagtcattcacagtgcacagaacccaccagtcgaaaatcgaaggatatcgggttctcacggtggctcggcggttgaggactttctatgggtggggtgaagagacattccgagtcaaatgagttaatgacttcagctcttctcagagggatttattacgatactactacgatgtttcaatctctctttgaagacgtcttttgaaacgtcttttgaaagtcttttaggaaacttgaatactacgaaaggcacaattgccataaatccgctttttgatccaattaatgcatccatgttaggtccctaatggttgctatgtatgcaagttgaactatggccataactaggctacaggcataagtaggacgataaaacgctgtcccttgctatttcacaaccattcaatctcccatgttggcaagctagaagccaggctcagccagaatattcataatgatgaaatgaacacacatgtcgcacttagggttgataccaagtctcaaggccagctgtggcatccttatccggagcaaattgcagattttgggaacatcaaacttgtaaaaatagtcaattacagtgatgcgattatggccattttcgtcacaagccgtggcaagggaagcttgtgtgagtcgaccgacgtactcaatgccttgttcacgcaggctcactttgacatctgcaatggtatctgacttcggctgcagtctgataaggcgagcttggtcttcgagccatgacaggaagttggttcgctccgtctgatagtcggagatgggactagacgcggacattctgagtctggatgaacccgagacttgtcgaggcgtgtgcagcttagcaggcttcgtggctgattttgaggaatggaaggttcatgaggtgcgtgggtgatagaacaggcttggagcttgagttggttagccatggtgtatgggatgcaatagaaggtccatgatactttgataaggtagagatatttagagttatccagctgggaggaggatggtgagaacaacgcatggttttataccttgcgatcattggagaatgaatggcattgaggttgtccacttcaaatcctattgagaaagagaagaatagcaacgaggccattgatgccgcctttaggatcaggccacactcttcacttctcagaatcggatttattcgatgaggtttacttctttcatctgtgtagcctatgttatacctaagcttgtttaaatgcatttcatccctcatgatatatagaaaaggactcttacagtctagacttttatatataaccttcgcataccgtacataccaatttctattcggtgctattgttcatttctttcagttataccaggagaggtcattcaagttgcacatccattcgctacggactacctggttggcgaacatagagcgtcatattatcataaagattttattgtagccaatgaaaccattcataacagagaattaacgcgtatattgctgggtcataatatcatacgaactcatacatgtcatcacatctgttctgtcggaatctcgtcgcagaccttgtaaataaccaaaaagacaaacataacgctgcaaccattatacaaaacgaaaacaaaactttcaatacacaatgatatataatgaccaaatcttggtttacaggttcgtcaatttgcggaaccaactggtgggcttcttagcatccgcactgggcggagcgggctttatctcacggtcacgttcgtgatcaccacttccagagctgctcttcacaccttcacgacgcgaattatgatgccgaggacgagcatcatcaatctcttcttcctcgtacttagcacggcggtgggccttgcggcgaagaacacgacgagcttcctcatctgatgaaagagaatgagaatgagcattgccaccttcatcgcctgcaagaggaggtagatcaataagagtagggactatctgcggtggctccggaggctcatcaccttgcgagtaaacccacgaggaaatcttgtctttcgcactcccgccacgattcaacgcaccagtcatgagcggctcgcgagttaactcaggggccaccttagacctgcgacgacgagcgttcgggtcttcatacgggcgagaggtacgggttcctcgacggtcgacctcacgctcatcaggaaagacctcaacagggatcctttgctcacgttcacgacgccggctcgttctcgcggcgatcatttcctcttcgcgcattcgccggcgctcgcggcgttctgcagccttagcttcggctgcagcttgggcttgggcttcacgagcagcctgctcttctcgagcacgacgttcctcgcgcgcagctcgtcgggcccgcttttcttctcgtaggcgatcttcttctttcagacgttcttcttcttcctcttcacgagcacgttgctcgcgcgctcgttcttttcgcctcgcgcgccgctcttctgcttcccgagcttcggtttcacgagagtcaggaggtaccttgcgggatccacgccgcgcatgtcgtgctgcgcgccgggcttccgcttcatcggcttctgtctcgacacccgctgctgcaccggcggcgtcgcccatgaacccttcggtatctggtcggacagatccgcggcgtcgatcttcgcgacgcgatcttcgagcgccgtcgcgctccatttctggcggatgtcttccgtcgtcatcacgatacgatcgcgacctgcgtctgtcgggcatctctggtcgttctggccgatctgggcgtgtgccttttctcagagaatcgaagagccccatgaatccaccgctctcttgtttcttcaccggagcggtgttcgagcgctttaggcgacgttcccttggaggagcatcgaaaaatgccatatcgtcggggcctgacataatatctgcggtgggatgtgcttgatatggatcaaccaggacaacatcgtcctcgtcaggtctgtgccgcggctatgaaaggcggtcagttggtacaacggcacaacaaatactgtgcttatcccgacatacctgtctccttgacctgcgccttgagcccttagagccttccttgggtgaattcctctcggcatcctccatgtcaaccacaacgaggtcatcgtcctcgatcgcatacggatctcgaactgtttcgtaggcagaaagtcagcaagaataaatgagttatgacgtaaatgaacatacctgatctccgcctgtccatgcgcgggcgctcacgtcgagacttgggaggatccatgcccatcagcctggctgctttgtcaaagacctcacgcttctcatctggacgtgctagatcggcagttctgtcatctagattaattgatggacgtctggatacgggtttcgacgaagaaccagatttgcgagtggatttgcttttggactggggtgtacccagtaccatattggccaaggtcacgccacgttggttcttcgaggaccgcccctcacggtctcgccgcttctccctgtcagacgcagacctttccacttctggttcggggtctttgggtcgaggttttccagtagactcttttctctttggaggttcttcctcttgaatctttgcttccttctgacttaacttctttggaggttctgcttcctcttgaatcttgttttccttcctcaacttcttcgggggttctgcttcctcctcctgtgtcgtgttttccttcttactcgacttctttgggggcggcgcagccccccaaaagccccatgatatggtgttcgtgttcttttcaccgcgtgctcggtccttcttagatgattttggaggctcttcagcaggctccggtggaggcgcggcagaaacatcttcatccttctcttctggctcgtcggctacgggctcgggctcaggctcaggctcaggctcaggctcaggctcaggctcaggctctggttctagcgcaggtattttttcaggaggtggggttggttccctagcagcggccgctgcggctgcggcggcagctttttctgcttctgcctttttatacttcttcagttcctttttcgacatttttgaaagatccggggccggtggctcaggttccggctcgggctcaaccactgtctctggctctggctcgggttcgggttcaggcctgggctcaggatcatctccaaagtctgggaagcttccagggatagagtccttagagactttcctttcttgagactcaagagcttctgctgtcttagactttgttcttgagcttttcttcgttgaagcacgctcctctataggaggttctggctccggttccggttcgaccttcttttctttggatttgctcttcgagctagccttttctgcctttgccttctccttcttggcgagctccagggctttgatacgttcagcaacactgagcttggaagccttaggcttcgatatcttttcgggttctggttcgggttcaggctcaggttcaggctcaggttcaggctcaggctcaggttcaggctcaggttcaggttcaggctctgggggattttctccaacgtcaataagaaggtcttcctcttcctctttcaccttaatcgtttcatctgccttcttcgttgttttgcttttgctgctagaacccccagtcagggtcgaccagaagccttgagaggctttttcctctttcggagcttcgatggcttttgtggttttctttgtgcccttggaggttttaggggctacttccgcccaaatgtcatcggcattgtcatggaaagcttcgggatctggggttaagccctgagcaggaggtgtcggcgcacgtgggggaggttcttcaatattactgcccttcttcttctttttcttgtcctttgctggcccccaaatcccccaggagctctcatcggcaggtttctctggttctggttcaggttctggttcaggttcaggttcaggttcaggttcaggttcaggctctggttcgggttcaggctcacgttcgggttcgggttcaggctcaggcaccggttcaggttcaacaactggttcggggacttcttcggggggcttgttcgatggaagctcgaagtccttgccgggaatgggcagtcccttacgtatcaatgttttttctcgcttcttgcgttctttagacgatatctcatgccaattttcgtatagagggttatcaggcacctttggcgcctcgggttcgggttcaggctctggttcaggttcgggctcgggctcgggctcaggttcaggttccggaatgggttctggctcaggtactggttcggctttgcctttgcttttctgcttgtccttcgatgtaactccccaagcggcaaagggatcaactggctcttctgctttcgccggtggttcatcgatgacaggcaccggatcagctaggaggtcaatcttcttcttcttcttcttatctttggttatcattgaaagaccccaaccccagccagtatctgcctcggctggttcctcgatttcctcggccaccggttcaggttcaggttcgggttcaggtacagccgcagctgctgctgccgctgccgctgccgctgcctcagcttccgcagcccttgctgcttcctgctctgctgtctcctttgctgcagcttcatcctcctctttccatttcttctccatctccttcttcgttttacgttgctctctctttggcagatttagaaaccatgcttccttcgtgaaatcgactctgggtgcaggagccggaggcgcaggcgcttcgggttcgggctcagtctccttcattttgtctttgctcgcatcccaacctcctccccaatcatctttttgcttggtttcaggcggtgcagatcctaagtcaaaatcaaactcgccagtctctgacgtcttcttctttggggttgctccccaggggttgctgtccttggattcgtcattgggaggagggtcaaccttgctagtagtccaggctttgccccatcctccgaaactaaacccagtccccccggtcttaggggctggactgtcgaaattcaagtccaattgcggtgccccgtcattcagacttatgtcttggaaccccccaggaggtgcaatctcgtcctgtaattttacttagacacccgtcttgtacattggagcagaatggtcttaccttccccttcttcttcttttttcctacattcgtgaaggcagcccacgagtcatcgcccccatcttcggcccagctaagatctttggcaacagaggcttcagaggcctttcgttcttcctcttccttggcttttctttcttcctcttcctcctctaatttcttcttcttatccttctttccgctcacattccaatcaccccaatcatcacccccatcacctccatcacctccatcgccgcctccagcgccgcctgaatctccaccagccccaccggcaccaccatcaccgttggatttgtcgtcgtctccaccagccccgcctgccggtggtggcggtggaggagaggaagtcggtggtggtgctgctttctttcctgttggctttttcttcttatgttcccgaatacccgtagtattcccaaaatcaattcgtacatccagcattcgatctttcggcagcgacgatgacggatcacgcgatttttcacgaggctttggcaggagggaaacaggcgtcgatctgcgctgcgcgagcggaggcagtgcagagtattcgggagggagatcatggattacatcgtcgtaggaaggtggaagctggtcgtaggacggtggttctggtgagcgagccgcaaagcgagaactcaatccggtgactaaatcttcttttccgggcacccagttatctggccggcaaaatcttgttttcttagtcgagaaagtagtccagacctcgcggaggagtttctcccccatttgcacatcccgtgcgtagtatgcgacatcctccgcggcgctagtcttccccgcacatacacgataagacccctcaattacttccatatcgaaaatcgcatgcgccgagctcacggtcggtccgatcacttatatggcaactcagcgacgtccaatagcgaacgcatcgatcgatgatttggattcaagtcctggtggcgggtattgtcccaatcgatcacggttttttggggcgcggagttgcgagagtgcggtattggtgtcgtaaggttgcgcgagggttctgtgagactgtgaggcaatatatcaagttaaatttcagtcaaatggcttccctggacgctcggcgcgtgtttaggtgctgttcgatgctgataagatgatgtatagacgggttaacagacggcgagagtctctaaaactgtgcctgctataaattgggcacaaggaatttcaaggagtcaagggagtcaagggagaaaagtatgaaaacgtgagactggggaggggatctggagaggcagggataataagttcaggcggtggaggtgaagatcatcccgttcagcccgctaagttcaatgtaggcacgtactccggccgtacaatgtactcgtccaacgttgctgatgcatttacgtattcgagggtgttttgatattagcgtgaaaggtactcgagtcactcaatttatacatgttcacggagtacatagtatatgaacaccccttgcgggtgaaacaaaaacatagatggctgggaacacagaaggcacagagcaagtacgaagtacactgtccttgaaactaacgatatgtacttcgtactttatacataatgaactcaaacactcacgaatagacttttctctacaatctgcatgtcaacaaacaaacattgaacgttacacagacccgcgatgatagttccccgattccatggttcccaattcgagtccacggattatgagagtatatcttgtgtagtaccgtggtactgtacccaaaataaagtctaattccatagacacatataaagcacggatccatagatgtacaacatatccacagtccatacaatatataccgatctcatacaatgcaggcacacatcgtatactgcaatgcttgcatttctacccttgggttatgaccatagtcagcatacgttttacaaaagttgcatgggatacagggtactctccagatagtgcaaaattcccctcgagcccaattcactcgatgcatcccaatccaaaagagtcacctgcaagcgcaacacatcttttgcacaccgccacttgaacttcggaatgaagaaaaaaagggcctagtgcggggcaggtggagagtcaaaagggtcctctttttctctctgactcattgatttaatggtgacactgaatctgttatagctacagggaattgaatgaattggaaatgataagtcccccatggattcattatgatatcctattccagcgcttcccagctaaaccaaacaaaaacaatcagtgtagagaaatagattgacaggacgaagtagaatacaatggggatcgcgaggaaaattgaaaaccgcatgtgacaaacaagcttgagagtccaaaccgagctaaacacttccgagaacaacctcaactaggccggcaccatcccaatggatcccaaccaggttcggattttaggctcaggttgaaagcgagacttcgggtgattgatgtcggctcttgggtgctgggaatccgtacgcctcctcgtgctctctctcataccgttggcgatcttcgatttgcaatttgtagtagcgctagattactagtcagcacgtgcaattcggtatgtatcaattctgctcggtgtccttacttctttctctgattcgggtagttcattccaatcgtgggcaataagtgtgaatgcctctgttccgggcttcccctggtaatcaatggtttcgaggcggtctcccaagtataagaggtaggcagatttcgggagtttgggtagacggtcatctttgatggaagggtagttcttgtcgacaagacgtgaaagggataggcgggcagtgttggcatccttgatctgaaggggagtgtgcgacttgacccacgactcgtaggcaacagcgttagcagctatgttcaccttagcctgggcttggagtctctagatttgggagatcagtatatcgctcctgacgtatacggagaatctcaagggcacatacctcctcatcttgaggattgagggatgtggaatgctctacgccaatcataaaagcttccttgaccgggtattgacctttgatcgcgcgcagcttctcagacaaagcaagactgtaagcagaggtaggcagcttcttaggcgggcggatcagggcagtcgccttgagttctctgatctgagcccggagttgcttgatcttccgattttcctgttgtgcctcggtgagatgcggcttcttcgctttgatgccggcttttttggtgctcttcgccttaggcgtcttagtcgccttgggaggggtagaagcagtagcgaatgaattagactggaatagggaacggatggaggaaacgggttgggcttgcggacgcatcgacccagagttaacggttagacagatgcgactaagctgattctgcaagtcgttcacgccagtacggggagggagagcaccgcggtgcagggtgcggaggaagcccccccgagctgcagactgccaagtcatgaggagatgatcgatttagctggagcgagctgcaataatagagatcgaaatgcgacaaattagcaattgaatctcgaaaagttaagaatcgatcagaggagctgttgacgcaaaccgagtaggagtcccgcctgctttggtgtacctatccgcatcgggcctagctctttcacatggccttatgtaagctgtcattccaaacggtttgcgcaagtgacaatatggtagacaaacacctcaacgttctttctctcggtggcctgaggtttgaatcgtgccctcaaacgcttttcttacgaggcgctttttcttctcccttctctttctctccccctcctctttctctcctcctcctccatcaatccgtgtctcgggggcttttgcgttctagtaaaactcactgatcagcctgcaacaatggctcgccacggagatactcgctcaccatcacctgtaggcagcacactttcttcatcccgacgacctcgcagagaggatgatcgctatgacagaaccaggcgggatgatgggcgcagttaccgcagatcccgcagcccagaggtaagtgcggcgcatcgcatattcgtatcttatcttgcaatttctgaccatccttgtgatatttagagacgataccgcgggcgcgaccacccccgcgatagagatgcatttcgacgaccagatcttcccgtagaccggcgcaacgaagatacttatcggccacctcgaagagaccgatctcgagaacggcgacgaggcgacgaccatgatctccaccgcagaactcgtgatagggattaccgttctaggcgagaggactcccgggatcgggaccgcaggcggatagatgatcctgctgacttgaagcccaagtctagacgggatgacagtcgtgatcgtgctttgagccgacggtctagatcccgaactcgagaggtaagctgccagcgtcttcgattatgccgggccctttatattaactgtgtcccgcagcaatctaagccgtccacaccggttcccactgcccagaccgacgaggagaagaaagcagagagacttgccaaactcgaagcatggaaacagaaacaggccgccgaacgcgaaaagaaacaacgcgaacaggcatcagttgatcccaagaagatcctcgaggcgattgatcggaaatcggttgtatctccaagtcctgccgcatttcctggaaagttgaagttcgatccaaaggccattgctaaatcatcaaacacgacaaccgctccccccgctgtgcttggtatcgatgttgccgtcccggcatctgccaaagcttcgtctgtgacaaagtccaatatacctagtactgtgcccgacacgctctctgagcccttgaaagccaagggtaatgtcagcgggtttggcctgggtgcaagacaagttctcgaagcagagaaaccctccgcttctaacactctgggctttggggatggagacgagggatccacacgcaagaaactcgaaaaattgccgaccacgactctcgatgtgacggctgggcaagatgatgtagacatgcaatctgaaggaaccgacgcagcagctgaaacaagtgccgcaagtgaacaccgcgatacacgactccacaagcaaaccgaggatgtccatatggaggactcgacgaatacgcaggctgattccactcctatggaggttgacgatgctccagaaatcgaccctctggatgcattcatggctgatctccaaggctcggtgccgcctgaacggacaactggggccacgttttccaagaacgcgcaccatcaacccgaggctatgtttaacgatgacgaggacgtggatgtgaccgcagttggtgatgagaaggctgaagatgtcctcgagatggcacaagcgaagaaaaagaagcgggagaggcctgagatcgaccacaccaagatcgactatgagccgttccgcaaggaattttacactgaaccctccaaccttgccgatatgaccgaggaggatgtagcaaacttgcggcttgaactggacggcattaaggtccgtggttccggcgtccctaaacctgttcaaaaatggtcgcaatgcggtttgggtgttcagacgttagatgttgttcacaagcttgggtgggaaaccctcacatccatccaagcgcaagcaatccccacgatcatgtccggtcgcgatgtcatcggcgtggcaaaaactggctcaggaaagaccggcgctttcctggttccgatgttcagacatatcaaagaccaacgacccttgtctagtacagatggccccatcagtatgatcctggcgcctacccgcgaattggccacccaaatccataaagactgtaagcctttcttgaaggccctgggtcttcgtgctgtctgcgcgtatggtggagccccgatcaaagatcaaattgccgagctgaaacggggcgcggaaatcattgtatgcactgctggtcgtctcatcgatcttctggccgcaaatcaaggacgggttctcaatctacgccgtgtcacatatgtcgtcttggatgagggggaccgcatgttcgatatgggctttggaccacaagttgtgaagatcatgtcgaacatccgaccagacaggcagactgtccttttttcggcgacgttccctaagagtatggaagcattagcccgcaagactttgaacgagccagtcgagatcacagtgggtggcaggagtgttgttgctccagaaatcacgcaaattgtcgaggtccgtaataaagaccagaagttcgtccgcctgctcgagctcctgggaaatctgtacgaacacgacgcgaatgaagacttccgcacgttgattttcgtcgaccgtcaagaggctgcagatgacttgctcaagcaattgatgtacaagggttatccatgcatgtcgattcacggcggaaaggaccagattgatcgtgacagcacgattcaagaattcaaggctggcgttttccctatcctagtcgccacatcagttgctgctcgtgggttagatgtcaagcagctcaagctagtcgtcaactatgacgcacctaatcacctggaggattatgtccaccgtgccggccgcactggacgggctggcaacaccggaaccgctgtcacgttcgtcaccgaagaccaggatcggtatgcgttggatatctcaaaggctctcaaacaaagtggacagccagtccccgagcctctccaaaagctggttgatgggttcaatgagaaggtgaagtctggcaaggagaagaatttctcacgccatgggttcggtggtaaaggtctggaccgtctcaatatggaacgcgaaactgcgcgacagcgtgagcggaaagcatacaaaaccggtgacgatgacgatgaagatgacaaacttgagacccagcaggagtcagatgatcgattgaacaaggctatttcagctgtccgatccagtgctgacccggctgttgcaccggctgcagcttctatatcgagtgtgccgaaaggcattgatcttgatgggaagattgttgtgcatcgtacggagagagcaccggcgactggttcaaagaacccgctggataaggtggggtctgctgttgcagatattcatgcgcgtttgagccgcgcgggtgtgatgagatcaggcgtgcctattgataaccgtggacctgatgccggagccttccatgcgacgctggaaatcaatgatttcccccgtaagttatcccgtattccttacatctttcagacaattacttaccactttattttatcttgcagaaaaagcacgttgggccgtcacgaaccgcacaaacgtggcaaagatcttggagacatccggaacctctatcactaccaagggcaatttctatcctgccgggaaggaacctgcccccggggagcttcccaagctgtatatcctggtcgagggtgagacggagatttcagtgaccaccgccatacacgagcttcgacgcctgctcaaggaggcgacactggcagcttcggagggtgaggcgcgggctccggtgggtggccgctacactgttctttaggtcataccttagttcatagtagtctcctagatacgttttcgaaacaaatcaatgattgtacgatatgctttgcgtgtctcaattcttgtaaaacctaaagataatgactatattcgtgattactttcatccggcagtggaactggggaacattggctaatcggaatgactgccgaggcattgtcagatcatctaacctaactatcaaagagaagcttgcttccacaattcatccacaaacaacgagccaaagaactgcagcaaaagaaaccagatagttcgctacaaagaagaacaataagctcacaaatacaacgccaaaaaaacaaagcccgggatataatggcagtcgtgatcaaatcaaaacctcgcataggtatgcctattcccatctccttgcagcttcagccccatctacatctcgcgcagccctctctgtgcgactgacttgatccaatgtctgcgcttgagtttgtgccttctgagcagctagctttgagcccaatttccctttattggctaaggcgccttcggcacgtttctgtaacacaacacaagtcagcaatcgtagctctacatagcatatatagagggaaacaagatatcatacctgtgcggcgattgcagcgtttgcacgtgcctcgtccgttccagcagtactactacctgtagtgctttcacccagagtacggccgggtgtagccttccagtttgtcttggccggaagtggggcgcggggtgcggcagttccccctgggttggtgccgactacacggccaggctgattgaaagggtctgcctcattggaagagcgggagcagatgttgcccattgtgattgtgtagtgagtcgtagggatcggagggtatgttgcggttaggctggggttggcgcaagatggagaaggtcgttgtcgttagagctccggctacggtgcggagttgatattcgagtacaccaattgaatgcaggatgtttcgctagggtagaatctgtaggcgctatgctggctgtaaatcaagttgtacgatgttgtgttgttgttcgcaagtcatcgcaagtggatgttggagcattgcgataaggctgatccgatagtcgatccggggtcaaaggcggtgaacagggtccgaaactgattttagtaagtcgggctgtgcattgatgcctagtaggatgcggtgaagctaaatacatggccagctcatagattccatggctgattcaaattgaactttttcatatgtaccgcatgcaaaccgcagacaaagttccccattagggctgttgaatggcaggtcggactatatgggcagaataaagcttagtcacgatctcccttggggaaatcatctccgcatgggaaaggaatttttcatcggaatgctggggaacatttttcgagtctgaactgatctcatgtctctgtttcctgcagttttgcctctgtcttatatccatcataagatttcctgaaattgatcgccaaagcgtgttctgcgattcgctcgaaaatcatgacgcctaacccccaaggtcctcatcctctcctacgtcccgaaggtcctcacggctacactgaggggtctcagtcggcacaacgttatgccccctaaccctctcgaaatcatttgaatttgatcctgcacatctgcgactccaaggtcctcctttttgcttttcctgcacgtcgatctcggtcaattctccgattgcgcctgttcgcaattagtccagtacaagcgcgtgacacgattgcgaaactatctgcactgtgggaggatatcattcggtgctacaacctaaactgtctcctgggagcggcgcacatactgggtggcgctttgactcgtgggttcgtgattttgtagtgggatatcgtacctgacggacattcactgtcccacttacggtcgcacactgctcggttcctcaactgtattttccccatatcgttcgtcttacacactgttgtgacgacagctttcctggccaacccggttcaatttcgctccaacaccttccctctgtcatctgaagtgaaccgtgcaccatggcttccgaaacccaacaaggcgatttctgccttgaatgcaactgggaagcgttccatattgatggcagacctgcggcagatccctcgggtaatgcgtttcaacatcattggaactgttcaagtcatgaaacccagataccgctacccccttgtgaggtcgatgaggcctgctgtgatgtagacgactgcgcgctagactgcgggtccgtatgtggccactttacgggctgtgacacttccactgtctgctcagtcactcattgcgcggatgacaactgtgatgatgataactgcgacgataaccattgcggcgatactcattgtgataccaaccactgcgaagaggatacctgccaggacaaccattgtgaaaatattgaccccctgtgcttcgaagaccactgctgtgaagttaccgcgagtcaagactgcggctttgatgctatgtttggactcaacaaccaactgtcgctagacacgggcgctttcccttcgatggcaatgggaaatcattccgttgggcatacgacaaaagccatgcaacatcctttccctggtctcgtcgatccatttcaacaggaaaacttcctatcctcataccaaacgcatgccacccactgcgagcaggatgtatccaaccacttcgagtgccatgatttccagaaagactggcaggggatgttcgtgtcgcctcctgctcccacacaggccgaagttaacccagccgaggttttccacatgctcggtatgtgctctgacttctcgatatgccaagatcaacacgtacctgggcctcagaccagtgtcgatacctttgagaaacccaaaatcgacacgtcaaatgcattcaattgcttccatcccggacatcatcatgtccacagccatttcaaaaatcccaatgatttcaacctgcaggttatccgcaaaggacctcaccgcaaccatcatcgctgccgagctcacacccatgctcatgctcatgctcacgcccattctcacccgtattccccttattctcgacagtctcgctcaagcatcagctctcacctcatttccagtccgggagaaaccccaccacctctcgaaggcgactcctcatccgtactcaccacaccggacttttctccagccgacagtaagctgcatatctgcaagtggacaacggagattcgcggaatcaaggctgcttgtggtgccacttttgccgactgtggctctctacaagagcatctcgttgcctgtcatatgaataccgtgaatggtgccaagggcaatgggtactactgctgctgggaaggatgtcatcgcccggatgagccattttcgcagaagtccaagcttcaaggtcatttccttacacacagtaactgtacgccatatctttcatctcacgatctaccgagggtaggacaaatgtgctaacacgaatggtatccttctagacaagaatttctcatgctcggtgtgcggcaaggcatttgctagacaagcgacattagaccgacacgagcgcagtcatcgtggcgacaaaccatacaaatgcaaagactgtggtaaatcatttacagacagcagcgaattgagtatgtcgttgtcaaattccttttaggatccaccgctgaccaccccagaaacacattcccgaacccataccggcgagaagcctttcaaatgcacctggccaggatgcaatttcaccacgggcgatgtaagttgtccatctctatgcgatatactggctcatgttctaacatcgaaccagtcttccaatatgtctagtcacaggcttagtatgatacccctgccatctcaaatgtttaatttactgactctgtctagcccacggagagcgaaaacataaatgccttttcccagggtgcactaagagctttacacgtcctggtaagttctgacctgagctctgttcttatcgcctacatgctaacgttaatttctccgtagaccaattgaaacggcaccagaggacaacacataaacaagaagcctgctcgacactcccatcaccgagccccgatcccttcactatgacccccttcactctcgtctaattatcaactcctttgaatgcatatttgaatgcgattgtcatgtcttatgacccaacggatttaggcgctatttgccgccgggcgtactatggaagactgagaaacactgtgtttctggcgttttgtggattttcgagaaccaccaaaaagataccacctggccttgatgttgccaggacttttcaccaaggattttatcgatatattgttttacccctgaaccgatcaaatctttgattggctcaaatgatctatttcctatgtgttcttattatgttatgatttgctttaatgaactcgcatatcaggtatgatattcgcgcatacggaaaatgaagcttgcagactaagatgcatgatgcctttattccttttgctggtgtggaccacaacatacaaagtaccagttaaacattaaatatacaattgccagatatgaaacccatactatcgatgtacctgagtagtgataggccagactttgagcagccatacagccaaacccgctcaatcttcggtagccctctcctcgagcgcctcaacagcattcttcaactcccgaatccgatgtccgacccgccgacgtacttcatccctaacctcctgtgggacctctgccggattagattgggtctcgacagtaggactctcctccgacgtctctgtctcattctcgacttccccaggacgagtaatgtaaaggccgtacacctcggacagctggttgagagcatcgcgggcagattcgcggtctgaagcagcatagatggtagacgagtcagtgctctcggtagcaatttcaaactcgtcttttgcgacttcgtatagctcttgtagttcctcgaccaggatatcggcttcggctttgcctgtggattcttttcggtcggcgtaggtcctcactgtgggtttgacaagcgatgattgaagagaacatgatgattggaatgagcttaggctcagtcgtattttcctagaactggacaggctgtgcaaagaccgaggaacgagatgcagtcgctgtacgaagggtcggttgatgtggtgcgattgtagacctccaaggcgcaggattgaggagccacgcgcagatcgaatgcatagttgggcagacatctcgaaaataggggcgaatgaattaaaaaaaaggtaaggtgtactcggtaaatgattttaagaaaggagctgatcgtaagatcggtgatgacgtcgccagctgtttatcgcatcacgtgccgatacagatctcaggggtggtaataaacataggggattgtgaccgtatgcatgcatcagaccgacgaaggcatcattttattaattttatgagttcattgcgacaattgccttttttttcttggtcttattcctttcttactactatgcctatacgcctacacggagtatgaccaacatagaaatctaaaaagcggaagcatcgtgaacctccctaagcttctgtagagaatcccgatcccgaaattgagaaagaagccgaaaaggttcagcctagtccagttggcaatgaatcttaaacaatcatcacaatcttcgccaatgccccattttcctccatcaaccgatgggcctccacaattttctccatcggaaaggtcttgattggcaagtgaatcttgcctgtcaccagatcccgagcgatctcctcaatgggcgttttcagtactgcctccgtggtactcgtataggtggtcagcttaacagaggtcggtatcgaccccatgggcgtgaactggtcaaaggtccatttgttcccagctatacccgtcatacaaacagtaccaccaggcgccgcacattgcagagagtcgtttagcgtggttaccccaaccagttcaaggattttcccaaacggagcacgtttctggacctcagccaatatcgatcccccgtcgataatgacgtcgtcaataccaagaccacgtaagaactctacgcgtgctggattccgtgttgttacagtgacagagattccatgcaatcgagcgagggccgcagctgccaaccccacgctggtagttccgccgcggaccaacaagcggtcactgggagatagcgcgagactggtgaacagggaaccccaagccgtctgcataagttcaggaagagcgcccaagatatcccaaggcacgggccgatcggggccaaaggcagcggtggcatcgacgcgtcgtacttggtctaccggcacagccgtgtattcggcatatccgccatcgaaggatcggcccatgccgcccattgcagtgacgacgacctcgccagctttgaagcctgaatccagggcctcatcgacgattcctgtagcttcgatgcccagaatacgcgggaatgtcacaccgggtgaatcaccttgacgcgtgaatacttccgatcgattgagcccaaaggacttgatgcgtatgcgcacctctccctctgtgggtgttggcttgggaaccgtttgaagtttcaacacctcagggccacctatattgtgcatcacaatagctcgcatgtcgaaggacgtgtttgcgtcagcggtaggattgatgatatccgtggtgttatggtgtgtcactggtgagagtcaaaggtacgaaacgaggataacagttgcaatcgcagcaagaagaagccaggaagttcacgtctacgagcaaatatcgggacataaacttaccaatacaacatagatagtgatatcacatggcgtcatttactccttccacggaaagcttctttctttatgtaagcaagatcccctcaggtgccgagtgagcgcgatacacgtcgacattcggagtagtcgacgtttggcccggtggaattccgatcacgcaccaatcaccaatcacagcgtctgggttgcagattccagggtgataatgcagtttacttttcagtgaaatgttcatttactagtcggttctgattgaatatatggcctactgagcaagatgaatggcggtcagtggtatttatgcttcagatgtagctgggtcaacgatccggccatatcaagaactcccgtgctggaggtagagtcggagtagaccaataacggaagagcgggccgaccggcccgtgccgccccaattgcggaatgcaagtctcggaggccatgttattccataccggcccttcatcacttatgaatctcattcaaactctcattcaatagagatcgtatgagccacactgctgttggctaggacaggagatacggtcacgcaaccgttttcaatttcttctagcagccttcgaccccaacgcagagagcaacttccattgcgagaaacggattgcgattggtttagctaggttcacggctattcttactgaggttggtgaattttctgggaaagggccaatgcttgctggctaacgagcttcaatgctgtgcagtacggctttttttgtcattccttcaattccaagttgttcttagtggcggtgcctactagatccaacagccctatacttattgattctagatgtggttttgcactttgaaactggagtctgacacagtatggctgaatctgaaggctctgtatagatgtgacgctaatgcttgaagtctatcccacgatccacctatgccatgccgccattcacgcgcagaacctgtcctgagacccagccactagctggggagctgaaaaacgccatgacctccccaatctcctcgggcttagctaagcgtcctagcgggctaagatttttcatggcatttagcaccggttctggcttgcctcgcgtgaataggacggtgtcggtcggacccggggcgacggcgttgatggtgatttctctggggcccagctccttagccagaactcggaccgtctgttcgatggcacctttcgtggtcaagtaaaggagatagggaggcgtgactgtggaggcgtgacaaagagtcgtggaaaccaggatgattcgaccaccgggacggagatgaggcactgctttctacaatcaaccatcagcagcaaagaacttttttttgtatcttctgcaggtgggttgtctgcaatctgcatgtcgtacctgaaccaaaaagtagggtcccttcacattcagatcaatactgtcgttgaagtcttgctccgaggtgtttgccaggtcatggaggggcaaggaaccggcgttggcaatgacaatgtcaatttgaccaaacttctccactgtacgacggatcagctcctcgctgtcgagcacacaactggcatttcccttgatagccagggcgttctgctctccaatttggctcaccacctcctggagcgatactggataaccaccttggcaccatcgcgcgtaagacgaagagctgtcgccttgccaataccattagagccaccggtgattatggcaaccttttcagtgagagcagccataacttcggttgatgatagataggggataacgaattaggacgacaggaaaggtgaacagaaacgacatttcaagtgcttgttttgcgcgagaggagaaataatgcttcatcttgacggtgttacatcatgctgacggtgttggtatacggcgtacatgagtttatcgacggtccatccgcctctgtgaagacgtagagtgatgcaatgagcagcgcagagataacacgcaggagctagtagagatccatcgatctctccactcgaatggaaggaacatccaactgggattcgagtgtgttcaacgcgtcaccgaccggctcttacctcctggcaaagcttcaccaacagatgaagtatccatgccggcgagagcgcgattgagatgctctttgcgtataatcgatttataatagtcagaatcagtgcagacaaatatacccaatcttacgggattactaaaaagagaaagaatcgcgcgccaagcatccaaaattatctgtattgagtcattcttcgaaaatggtctggctaggtaatctattaatttaatctagtatgtagagctaaacatctcggccaagtttgttctttctccaacgcgacttacccttgaaggcctcatcaatctccccaaaggtccgacctttcgtttcatgcatgaagaggacgccaacaatgacggtaataacacagcatccaccgaacagaaagtacacaccgaagctgctcttcgcaaggagaacaggtgtcgtcaaagccaccaagaagttgcacacccagttgctcgaatgagctaatgtggtagctgatgctcgtgttcgctggggctgaatctcggcactatagactttgacggagataccccaggtgacggagtaaagagcggaaaagaggtagatgcagacaatcaccacccagcgaccgacgccagtagatttgtggacggcatttccagcataaagaccgcccatcaagaacatcaagatccccattacaaccccaccgtagataatgctgcttcggcggccccatttatcggcatagattagtcccgggatggtgacagcgaatatcacaagcgctgacacaccagaggccaaaaagcttgcttccgaagaggcaagaccggccttttgaaacaattggggggcatactagagttcaagtcaaccactgtcagttgtatcgaggtatggaaagggtttgagcctacataaaggacaccatcaataccactcagctgctgcatccccatcaaaaagactgcaaggatggtccggcctaaaacgtctttggagaagatggcaagaagcttatccaccgttccctctttgggcttctcgatttcagtttcaacctcctgtgtccgtacttgcagaacgaccttttcgcgctctgcgcgactgacacccaacttgtcccacgcctcttcagccatcgcatagcgaccatgaagtcctagccactgaggcgactctggtaagtaaaggagtgaaagtccacacatgaccatggagaaagctgcaagaaggataaacggcgtgcgccatgccagtgacgagtggaggcttgaggttccataactgatgaagtaccccatgaccaatccgagagtaatggccagttgagggcctgttgtcagtgcgcctctggtgctagttggtgagatttcacaaatcaggacgacaagatttccaaggaaaagtccttctcccaggccctccacgacacggccaacgatgaacatggatagggcaacggctccggcttctattgcggctcccacgccgaagatgaaaacgccgatgcagatccctttcggccgaccaagccgatcggcgacatagccagcgaagaaagacgagagtgctgctggaatcaagatacatgagacgatgaggccgtgaatcgtggagttttgactaccaaatgactttttgaagtccttcatgtcggtcaccgggccgatgataccggtatccatcccgaagaggattccgttcgctgagcatagaatgcatgccagcatatatttcggtggatttctgaactgggaaggaattaatcccattacttcggcttcggcttttggtgtttgacaggctgaagatatttttcggctcgggttgtgggaagtggaaagaagaaacgaaaactcttacccctctagacccccacgtagggcagtcatcattatccattgggtacatcgtataaaatgccgttacatgcatatatcatatccatcattgctcactaggtatctgtcagaattgaccaactgtagggacttgccagtattatatattctgcaaaaaaatgtgtccccagggctagacggagaagctttatccgggattgtatttgagctcttcgctgaatcggcgtgtgagaggccgaagcttttgtgggccatcgcttctatctcggggtatctcctggggttttcccctcgtttctgacgttttatggggcttccggggtacatttcacattaccatccgcttttcgatatacatatgttccctcatcaatgtgatggagagtggtttgttccattctggacactcgaagaatcgagccaatcatcactctctagcctttcaacaaaattattcgtcgaggaatccggcagatcccgattcacctctcgctctctgctgtggcagataatcgctatcttcgcactgctcccgccagagggtcctttcctcagacagattgacggagttcgtgtttcccttcagcgttccattgacatgcttgcgccagatagccttgaaggacggcacatttgctgccgtgacagcgacgttcagctcaactgctgagataatgatcattttgccgaggacatagatgaaatccgggtttactgcgaactcatgaaggatgatgatacgggccttatggggaaggcaaggattttaaagtccatgaggatgcactaatgatggatagattagctacatgctctatttcctgcagtttgaatttccttggagactcgccagtgcaacaggaacgtagtaggttaccgatgttgacaggcacgtaacatctgggtatgctgctgaattccaaaaagctgctaggggaatgtattggaaacaataaagcagccgtatggagatggagaccaagacattcagtacaatggtcccgtagacaccttagatgaaggtagtgttgttgatgagtcggagatagaagaccaagaaccccgtcttgatgcatccaaatatatacgatctccgctgcaaagagaagctgtgaggttagaacgaaaccgacaaagggaaagggtttccaggcatacctgtgtcaaaatcaatatatctttggatcaggtatccacccccatagcgaagaaaagtataaaacagcccttgttgtgctgtgttgtaaacctacacacgctattcgttgtcattcttcatgatacaatggaaactaccatcacgaccatccaccaatgatcctttccaaaagatgataatctagccccgcgaataaatgcgcaagcaagctgagaaggtattgatcgcccacgtatgcccacaaaaggaaggaaatggcgtatgcggctggctgaaacgactcaaacattttcacaacatataccgccagcgcggcatagccggagccctaaacccgttgtagcgtgaaagatcgccggttctgcagcgtccccacagcatctagcctaacagaccaatacttttcctttgttttggaattgacatgtttattcagcccgatggtggatggtggatggtgatggtggggaacacgtattcggtactcagggctcagccagcctccgaacagctggacgtcttatcataaccatatgatacgggcaactgatttcgaaaaaagaggcgtacctgacagtcgccaggtctttctccgaccccttaagagctacattgttctgtctacccctggttaaagaaagcccgaccccagaaatactgaaaaacggaaaggaactccttcaggacggacagccagcgaatttggaaaagatggccgtggcaacgagcctggcggtacttctgagtccagcgcctttacggattgcacctacctttctggtgttgggagccgcatttcaccagttcattcgtccatacgaaattgacaacaatatcttttcccttgcggccttatatctgggaaatatattagccctatgcgctgcctggacttatgcctactctctaagcgtaccacgtgcgatcggatgcacactactggccgcatgctacttcaacgtcggactgacagtcagtatcctggtctatcgagccttcttccaccgcctcagaaaatttccgggtccatggacagccaagttgagtcggctgtcggcagttaatcgggcgatcaaacggacacagcaccaccgggaccttcaagaaatgcacgaaaagtatggcgacttcgttcgcacggggccccgtgagatctcgatcaaccggccatcggccgtggtcgcggtcaatggttcacattcgccctgcacaaaagctccctggtatagccatgtgtccgacgatagttcaaagatctctttgaactcgactcgtgatcccaatatacaccgtcgtaggcggaaggcatgggaccgtggatttagcatgaaaggtatgagtttcaaccgataagtcctctatcttctatcttgtactgtctcaaacgtggtagctgatatacataatagccatatcattgtacgagccgattgttcaaaacaaggttaatgttcttgctactcagatccggtcccgacttaatcaaccgctcgacgccgcacagtggacgatgttccttgcgtttgatgtgatgggtttggttggattttctcaagactttcaccagctggaaaacggcaccgagcagcctgctgtcaaggagctccaccagcaattgttgtatattggcattttgaaacccgcgccgtggattctgaccattcttggaggcatccaagggttagtgggtgactacggtcggttcatgacttactgcgccgacaggattgcggacacgaagaaggtaagttttacccgccacttatatagctgttccgccatggttgctttttccttgtcgggagtgaccttctgacgtacgactacagagatggaactcgagaagcgataaagacagtgaaaaactccccaaggacgtcatctcctggctcctcaaggccattgaggagaaagaccctagcgccccgccaggcgatcaagcgcttaacgaagatggccgtctcatgatcatcgctggaaggtccggcaaccattctccacaacccactgtaaaagaaactaacttatcttcagtgacaccaccggcacaaccctagcccacgccctctactttctggctaagacccctactgcatacaagaaactgcaaaaggaactgtctgacgtctttggaaaagccgcggagccttcgcagtttactaacagcaagcttcagaacctcccttatctcgaagctgtcatcaacgagaccctccgcctcaagcccgctgtgccaagtggtcagcctaggttaaccccacccgaaggtctacagattgacgaggtctggatcccaggtaacacgatcgtcgtgcttccgcagtatgtcctccatcgcgacgagcgctatttcccctccagcttggaattcattcctgagcggtggttggatgagaagaacaacttggtcaagcacgaggaagctttcttcccattccaattaggtcgatacggctgcgtcgggaaacaatttgcgctcatggaacttcgagccgttatcgcacgggtggcatacaatttcgatctcgcgttcgcacctggggagactggagtgtcgtttgacgatgattctaaggatacgttcacttttagtattgggtctttgcctttagttttcaccgagcgatcagaatagaggagtggtattcgacaggccttcttgaaattgagatttttttcattatgttaaaggacaaaggtagcgtcacttagttatcataagcctttgttgttcgaatggtgcgacaatgagatccacgacaatttctttcatatactgtgaacaatggcgtttgtcccagtatttattctttgaatcaaatcgaataagtgccgactcccatatagcataaatactgttaatatccacaagtatctaccaagcaaacatttggattaccttccatttcccccagatgcttcaatcttccctgtaccggatcgtgcgaattttcttagttactcttgacttctggttcaacaccgatctccccgaaagccaagttcaaaggagcgataagccctcccaatcaattccatctgacctgaattcttcatctagtgcccaacaagccgaaaggtcatcttctaatttcgaaatgaaaacctgggaggaaatataccaagaggagtgccttagtttcaaagccagtctggagacccaagctcggattttaagaaacgatccggaaagtcaaggagtggatcgtatcaatgatgttcgcaaagagctaatatcactttcgcaccaggcagagcgaatcaaagaggctgcctttgaaatggtcgacgagaccccggacagtgtatatgtccgcaatgccacccccgagtggctctcctcccgatttggagatccgcagctagaacaggtatgtattagcatggaatacagcttggaccgaccggcatttgagcttagatctgatccgtcaatggaccttatggtcgccggacaccttgagcaaatgaccgacgatattgagatggattttctttagataaaaatgcatttattcatttgtggcctctatggatctacaaaattgtaataaacgagaatactcactaatagtcgggcccagtatgcggctgtaggaattaagctgagaagagatgataacttgcaattaggtataacatatgtgcaagtcttgtatctataaataaggaaagcgaaagttgtaaaaagcaattgccattctgctatgatgttcttcttaattttccagtgactttccaagtcctgacccaatccatcattaatgagcgtatacagttcgtgtcgtcatgtcttttctccaagaaagccgatttttcagtccactgtcatttccaccaagtccagcatcaaatcaatcccactctgaatgcaccgaatatgaaatttactcctgctgaccagtgatggccttgatatccttgttctgggccttgttttggtcgttggtggggtagttctggtaagagccgtagttcttgtagtttccgtagctctggtacttgctgttctgggagctgggagtaacctgagcgttgttggcggagttcaggttgttgttatcattgggttcgttgcgtgaggccacggaggggatagaatggcgcttttggtttgcgtgccactggccattggcatcggtccaaccattctggtcattctgaccattttggttgttggcgtgccattgaccatttccgtcagtccagccattctggtcgttctggttgttggcgtgccatttgccgttggcatcagtccagccattttggttgttttgttggccgttctggctgtattgaccgttttggttgttgtcgcgccactggccgtcatgctcaacttggccagtctgattggtttgattgtggcggttatcgccgttgttggcgacgaacacgccatgctgccactggccttttcggtactgtccactcgggtcccattgaccggccacgtcgttggggtccacgggaagtgcgaggacagatagaggggagacagccaaaagaagaaggcttttgatgattgaggagcgcatcttgaaggaaggtgaactagaagagattcaaacgaaatatgaacggtttttgcttcaggggtgctgttgcgatcctaaggttctcgagattgtttgtgttaaatggcgattgaaacccggttagtcgggctgtatttatatctgagaaatttcacctccatgaattatgtagctcaaaagtgctactcaatagctttggaagcctttgacaagaatgtctgaggttggctcacgccattcctcggtgtggtttgatgcgaattggcgctgtaagggacacggggaaacgtgtagttgataaccatgctgccttgcgggggataagcgaacggatgcgcgatgatctcagtcagctgtaaaagatggagtagcacgcggaaagcagagcacaacaataaagattaaacctttgagtggatacatgaagagttgcatgatacctcgcgtgagtctgccaaaaaagaattcgtggatcttgtccgcaagggggtagtaatcacattcctcgacgatcacccgcggtcaaatagtcctcatcctgtctggctagacgaacaaagtacacttacgccatttcaatgcatatgatgttgtcttgtatgtggttgatgatcccttgaggggattgtcatcttaaacatataccacgcattgggactcatgggatggcgaaacttgtgagacatgcagagaacacgttgctttgatcagcaatggctacgacctcgaaggcttcgagttgatgtcagtattgaagctgagcaaagtccgctgcgtgaagttgcggtctggggttggcgtctgctagttacagaagccaaggctgttctattgccccttgaatggaatgatcgaaaatcagttttgcgcagttttgctctgcaacatttagcaaactactcacatcattacaatggactctatcttcgacaagaattgtcatggggactattctaggcgagagtccggtgagggacttctcgcagaggaagaaggcactctctggaatagaaaggaaacaccaacgccaacgtgtaacagcttcgcggtgtgtctgtttcagctgagtgcacttgtgctggtattcttagtcgggactctgttcggctttcactggcgtggtgatttggatggcctttgcagtcgacatgtttctcaatattgtaagagttccaagcttctatggtgcaactcattaatcttattgagatacagcaactgtcatgaaggaagttggaattcaatatagtctgcaagaattcaatggctctctactgaaagagaatgtttttcgacaagatgctggcccagatgttgacgcagcatgggagtcgttgggcgtcaactgtatgtcccaaagtgattaactgctttctggcatgggctaattagaatcatgatctaagaccgcagcattcgagtaccaccagaggatgctgaaaaatctggacttgctaacgaccaagtcaagatcaatgcgaagtatgggggaggatttcctgcgaatgtcgagggcttgcatcaccttcactgtctggtaagtggtctagacctcgacctatgtctgtgaagatgctatactaataccgacaagaatctcctccgtcagtcgctctactataactatgactactaccacgccaagggggaagggcccttcacgaacaatgactatatcctccgccgccacgtgtgtatgttgtgcccattattcctttctcgataagattttgaactaattattctctcatcgcagcacattgcctcgatattgttcggcaagagctcatgtgcacagttgacagcggagtgctgggtcaagtctggatttaccccgagaacccggagccctatgttgacttcaacactcagcatcgatgtaaaaacttcgatgccgttcgtcgctgggccgaggacaaccagcttcctcaggaccccccttcagactttttgcagccgccatcagagggagaccgaatctatatccaaatgccatgagacatgacaagcaatatttgagctagactcagacagtatacaatagaatggaaagaataaacctcagcataggtgataacaccaatagaacaaaaattcgctcaattcaatcaagattataaatactcaagtcatcactcatccccggcaaaacatacacagcattatcctcgcccccaaaaaccttcaaaggcctcactcccctaaactccatcccaatcttctccaaagcgccgcgactccgctgattcgtaggcgagcaaaatccaaacacagcatccaccccaagagacttctttgcatactccaaaagacccttcgccgcctcggtcgcatacccctttcgaccttcttcgggcaacatggcaaacccgatatctggggcaagataatgtgggcctggtggaatgcccctcgtgagcgatacactgccgatcggcttcaccccatcatcggcctgtcgcgagactaggaacatgccatagccatggtaggcgtagtgttccgagactctgccttggaggaatgaatatgccttttccggggtggtgattccagttttgccgcaggagctgatgaaatcgtctgtattccagagttgaactaagaaggcgcagtgggtcgggtcggtggggttgaaggggctgatttggagacgcggggtggaaatcgtgaagcccggtgggaaggagaattcgggcattgtggcttggtagttggattataccagatttgattatagaatgaagtaaagtgtgtattttcttctccttagcacgatagaattaccagtgagtcacagttgaggctggattcaaaggaagcttagcgccgacaggggttgacggcccatttaggtatgtggcgttctggctatgagctagaaagatagagagaagagatagggacaaaaatctgatagacgaggtttaacgacaagaaccttttcgcacattatcctattgtcccatcttcatgccaccgttggcacataccacactgccagtacaccagagagcatcaggcgtacacaacatgccaacaacacccgcaacctcatcagtgaaagccggtcgacgaccacccatcttctcctgaattaactgcttctgctcatcggtcaagcgactcacagtgtccccgtgatccgtcagcttgctcataggcgtgttatcctggtatccttggatatccttccagaactgctctccggccttgaagtacatatcaccgacgaccgggccggggttaaccgcattgacggtcgcacgttcggacagttcacgtgcccaggtgcgagtcatcgcctcaacggctgctttggtaccgccatagatcgactggcctatgaaacccagcgacgaggatacactggagatgctcacgatgcggccgcttcggtcggttgggaggaatggggcgcatgcctgtgtgaggaggagcggggcgaggacattgatcgcgtaatgccagttgaagtgctcggcctcgatgggccccctattggcgtcgttcagggtccggtcttgcgatacgccagcattattgatcaggatgtcgatctggagttttccatcggtgctgaaatgctgctgcgcggtagcgatgattgctttcacggcttcggtaggctggcttaggtcggcttgcaagctctcgcatttgatgttataggttttggctaaaaaggagcacagttcttcggtgtgggcgcgcgaggactccgaagtaaagatcagaagtaatgagcagccctttgcagccaggttacgggcaattgcttcgccaattcctgcgaaggtggcgtgttagcttggtctcttggtatgcgggggagctaggctttaccccgcgatcctccagtgacgatgccgaatttcccttcaagtactcgagccattttggatatcaatgagagatatcaatgagagagatgaagaaataagtaaaacgaatttgattgagggaggacatggccaactctttaacctctcttttcttatttagccgagttaccccatccctccccttcccacggaataaaattgcccgttgcagaatgacggaggaaatgcgtgtaattcgggtaaattcaatgtcggcccgaatggtcgactgtggagtttgttgtttgttatgttggcatggtttgcatcatttgcactgtttggaatataatatcgactccatctttcccttaccactcactcattgctagatttctgaattgaatatactcttttgctttacaagagccggctagtaacaacactgcctttgttgtaagagtatacagtctatctcagtctatctctagtggtcaatcctcccattgacactataaagttacgataggtacattgaggggttaaagcgctagcccgattaggccggttatcgcgatagtcccctgaaatggtgtttgacccggcgctcggtactgtagagcacctcgagtttgtgtttctacatctttcgggggctatccatagtgccctggcagtcctcgaagtcatctaatcatgtcacccttcaccgtgccacccggcgaccagagcgtccaggttcgaatcatcgattcgactactaggattggcaaattaccactggcgtttctcatggaacctccgatggaggggatgcattatatgcatccacttccggcctggtcgttcctgatcgagcatccttccggtcaaaagattctctatgatcttggagttccgaaagatttgaactcgtttgcgccggtaatttgtaaacatctcgagacgcagggatgggaagttgatgtcaaggaagaagtgatcgatactctcgataaaaatggtatcgcggcgaatgagatttccgctatcatctggaggtaagtaccttattcgttgattgataagtatacaaacatcgtaacgtgctgacggtttcgcgggaagtcactggcactgggatcatatcggtgacccatcgcggtttccttcctctaccgatctcatcgtcggccctggtttcaaggctgctttccttcccggttatccagcgaatccaggtgctcctgtacgtgaaagtgactttgcgtaagtcttcgattggcgttgtcatttattagttggtatataattgaacttgccccatccgctaaccttcatcccacgaaagtggacgaaatctacgggaattagacttctctgactctgtccaagttggccagttccgagctgtggatttcttcggtgatggttcattttatatcatagacagtccgggtcacgcagtcggtcaccttggtgcattggcacgtaccacgactaatcccgatacattcatcttcatgggaggtgacctctgccaccacagtggggaaatcaggccatccaagtatctccccattcctcgtgatattcacccaagcttccctactcccagctcacttccatgtcccgggcacctggtatacgaggagttgctagtccgacggactggatcggtggacaagccattctttcgaccagccatgggaccagatattgaacagacaatagacacaatcgataaagcacaggtggccgatgcagatagcaatatctggtttatttatgctcatgatcgcagcctgttgaaatgtgtggatctgtttcccttgccggctaataattggaaggaaaagaattggcgggagaaaacactgtggactttccttgaagagtttggaacggcgatcaagcagatttgaatgacatgaaattgagcatgttgatactcgcatgtaactacatcctattagatcggtgtctcatgccaggagactagaatcaacgtcccctttaatcttaatttacgctttgctgacctgtcgtcacggacaatcttgttcaaaactgtttctaataatacaagcctctagttataaccacgtgcatatctccacaacagatggcgtagtatatatttctgcggagcgcccaagccgcaaactatttcgggccacggagtagactcgtggtgattatgcaggagcaagagccaccggcgctagatccataagcttcattagcaagcaacaaacctgacgcaagccaacgtcaccagtaaggcgcctcgactaagcctgtcgaatcttttactccgtagggctcggacgacctgcataaccacccctcccctcaaccccacaagctcgtgctagcttacggatactagccgccccgctgagttggagccttcagcatgcaggggctctcgtaaaaagcctcgtgatgactgcccttatgactagttgcatcatttccgaccggggtcgacccctgggcgcttccattaaggggctcatgacccagcttttcatgcaaaattagcaatgtcatctgcatatttttggtttgcagcgttatcagctcggccccaaattggaggtcaaggtccatgccgctggtttttatttactgtatattttcaactgtttccctgtctgcacgattatagcgttcccatatcaaaaactcgatgagatagggcaggtgcacagatttccgtggaaattatattctagttacccaggagggagcgcaaacttggacaaaatgtgtttcttcaaactcaatagaacaatgtgattcctatgaaatgtaacgcactcaaatgatatctcgctataggccaaaaacttcccgccggttctgatcaattggacttattccgcttctgtatgcgcctgcttctacgtctcccagtatcttgagtcccttgatcaggaagaaccgatttgttggttaaattatccactgcgggcctggaccttgatatctccggcttgagagttgcggaaacctttcgtcttgctttcttcgggccaacacgagcggccgcccgtttcctcttagtagttctttggccactgtttgaagcgggaccatctacttcagcggggccatctgcttgggcgggaccatctgcttgggcgggaccatctgcttgagcggggccatctgcttgatcgggaccatctgcttgggtgggaccatctgcttgggtagagaaaagcccatcaaaaagcggaggtctaggttgttgattgaaggtaacatgctcgctaggcactgtcgggctcggactcaaatcgcggtcgttatcgggtatctgcaaagggatttcatgcttccaaaccatcccaggcaatatgccccatttgtcgttccaaatgcctcttttgatccagatacttttcacatgctcgtaagcttcggtgttgatgtttgtcaaggcagagacagaagggctatctggggagtcggaggcattttgaactcgttcgcgctccttcgatatttgatagatgaattgatgaaatgggcgtgatggctcgtccccgggcttctgtttggctttccgctcaccgctgtggggtatccttttgtcccagaatccggccttcgtcggttcctctcccctcgaccgagagagtcgatcgagatcgattttgggcgcaggagtaacctcgggcaattcttcatgcctccacatccaccatggctgaggtacgtgctcccattcttcgttccagattccttgtttcatccagttcttcttgactgtctcatgggcgagattgttcatatttgtcccgtcggggacatccaatgttcggttctcgattccctcgattatgcgagcttccagttcgtagacctgggcgtcaaattgcctattggctcgtgaagcatcttgggccttcatcacttgccatttctcgcgatcacggcgttctagcctctcgcgtttatacatcgttgaggggctatcggggcttagggatgctgttgaattgtgcgaatggtgggaaatgtatgaaacgtctctgtcgaaacgtgatcgctcaatatcaagtcgcctcgggtttttaacaaggttttcgagcgcggtgtggatagtagttagaccggatctaatgctagtatcggccatactgaggggattggtagaataaaatagaaaagggagtgagagggaaataggagatgggggggatgtgacagaatctagtgtgacgtgagcgctaagctgcagtaactagcgcgggaatcgacctcgctctatattcactgaacaatcatatccaatcatttaccgcccaacattcgacgcctttttactattttcgtacagtatcagtctacttttattcgctgaaacgatcactgaaacgaacagcccccaatattaccagggtatagcggttgggcacacttttgtactcgatgccaaataatacataatgtcttccatcctccttccgagtgtctcttctccgtttgatagttgtcccctgtttgaccttgcttccttgcttcaatatgtcgtcattcccacaccctcatcgccttgctctcttctccctccggcctctgaacgaacgagccaagaatgtcgccagccatcctgggaacaaacacctaacgtcgaagttgaacgatggtacaattgtccttgatattggcttccatattcggtcgcggtcccgtcacacaattgcaacactaggacgtggtggagatgcggacctctttatcgagggcttcaacatttccaagatccagtgctcttttgaaatcgagccgaacaccaatgtcatcatgctctacgacaggtctcatggccagacaactcaagtttttggtcacaatgctacgccatttgagcatgggcgcgttcgtcaggtagtcgttcagaagaatctgaacgatgttctggggatgggcggcaaaatgcaagatgtctttagattccagttgctttggcatgaaaatacttgtctaacgacggagagaataaaagaactagagtccatcctagatgaccatgtggaaaacccgcgcctggctcggacagttgatgatttggaaacggttttaccgtctcagatgcagaccagaatccacaccgccggccctctacagctgaagatgcgatacacgaagattgaccgactaggatctggacagttcggagttgtatataaggctatcgatgtcgacacgggtaagcttcttgctgttaagatacttcaacagcccgagcaagctttggatgaggagtggagaaagtcattgtattatgcattgaagcgcgaggtcgaggcattgtcccaaattagccacgttagtaagccttccattctcagacactgaaactgaactgacgctgccctagccacatgtcgtcgattttatcacctcgcaaggctgggacggaccggcggcggagatattcatgggtctcaaggacggtgcacttagctccttggttctcaagggtgactttatgtccgtacacgacctcgccaaatgcgtctgccaccagatgcttcaggcgctagattgtctagccgtcaatggagttgttcaccgagatgtgaaacccgaaaacattctttacactgcactaccgaatgcgcaatatcgattctatcttggtgatttcggtctatgcaaccgcactgttagtgctcatagctctgttgggaccccattatacacggctcccgaggtctgtcaaagtggagcccagacacacaaaatggatgtctggtccctttttgtaacaatcgcatggatactagacttcgatggatttcgccagaacttacagcatatatccctttggcaggcccaacaagctctcctagccataacatcaaagattggagatattcaagagatggcgagagtcgatccgggcgagcgtgcctccgcggcacagatgctggtcaagcgctttggtggagaaggcctttcaactcaactcaatcaaattccaccactcagtccaacaaaaccggtacccaaacctgaggctgagttaaatgtcaaaaaatatggaccagcccacagttcacgaaaggttccaaaacaacccacaaatctgacccgcgcccgtcagcctagtaatccgcaggctcgagtattgaggccaagaaccatagatcgccttttgacgaagaagcatgagcttctctcccatgttgttgaatcccctgggtttcgtgtgcggcggccatataaacattagagtatgcggcgaagccgggggagcctagggttgtcggtccacttaactatcagaatgcttcttctttatttcttcgatactttcttgcggatactcagttcgcgttttgccgcttcatctgctcattataattacttatgcaatgcactttgtttcttcttaaatttaccactttccttctatcgtagtcctccatacaaagtaaaatatatgctacccgactttccccgatttgacctcaggcacagatattaggtatgcacttcgccgcagaactcagcgcgttagcaacaaccgtcagcgaaaaacacccaaccgtaactgctacgcgaactggcagtagcagatgaactagccaaattgatccgcgggatagattctacatggccagaaatatactcgaaatctggccgtctacaggagcaactacaaaagaaataaatgttgacgcatagcttcgattgttgaagtactacaccgtcgcaatcggcccatggaggcccacacaccagaataaggtatcaagaataaaatccatcacgcagtgttgaatgcaagaccatcccaggtcatcccacgccaaaacaaaaacattagaaacacaccaaccccggtgtaggccactttttatgccgttgaaggacaaccacttttgagttctaagttgatggagaactcatatgccaatcataacatcgtcgaatcatgttgaaagtctatttcccaagagtatcatcgaacgcagttgaaaatgtaaagaaattagtaacggtagatctcgggcttgtaggggccgttgacgtccaagctgaggtagtcggcctggacgggggtcagctcagtgagcttggcgttaacgtgctccaagtggcagcgagcgacctgctcgtcgagctgcttgggcagaacgtagacaccgacgggcttgcggccactggcaccgaactcgatgtacttcttgccgaaggcggtatcctcggccttgaagagggcaatctgggccaagacctggttggagaaagagcaggacatgacgaaggaagagtggccggtagcacagccaaggttgacaagacgaccctcggcgaggagaatgatgttcttgccgttaaggttgtaacggtcaacctggggcttaatgttctggacggactgagcgttggccttcaaccaggcgacgtcaatctcgatatcgaagtgaccaatgtctagatgatagttagtaacgctcataccaacattttggctcagaacaacttactgcagacaatggcgtcgttgcgcatggcctcgaagtgacggccaacaaggatatcacggcaaccagtggtggtgacaaagatctgaccaacaggggcagcagcctccatggtgttaacctcgtaaccctggacggcagcctggagggcgttgatggggtcgacctcagtgacaatgacacgggcacccatggagtggagagcctgggcacaacccttgccgacatcaccgtaaccggcaacgacagcgatcttaccagcgatcatgacatcggtagcacgcttgataccatcaatgagggactcacggcagccgtaaaggttgtcgaacttggacttggtgacacagtcgttcacgttgatggcgggaaccttgagtgtgttgtccttgagcatcttgtacaggtggtggacaccggtggtggtctcctcggagacaccgaagcagtcctcgagcatctcggggtacttagtgtggacgagggaggtgagatcaccaccgtcatcgaggatgaggttgagcttcttgccatccttgaaggcctggagctgctggtccaagcaccactggtactcctcctcggtctcacccttccaggcgaagctgtaaaaaaataatcagacaatagtccacaaaaggcgcaggaggatttgtgaaagaatgtaaacttacacagggacaccaccggcagcaatggcggcagcggcgtgatcctgggtggagaagatgttgcaagaagtccaggtgacctcagcaccgaggtgagtgagggtctcaatgaggacggcggtctgaatggctaaaggagcggtcagcgcaggccttgctttttatgatagatcagatcaacatactcatgtgaagacaaccggcgatacgggcacccttgaggggctggtcggcaccgtacttctcacggatggccatgagaccgggcatctcaatctcggagagctcgatctcgcggcgaccgaacgcggcgagggactaggaaatggtcaatgattgaaggaggaaaaagttaattgagagacatacgaggtcagcgaccttgaacttctgtgcgggagcagccattatgtgatatatgtattcaaaaactgctgattgttagtgagaagatcggaattgcaggcgtaggaattgactgaccaaagggtgtatgaatgagaaaggaagaggaaagagggaaaaggagaatagaggggaaggaaaactctctaagagatccaccaaggtcccggaacgtggcaagtactcactacttacttacggtatgctttaacgtgtatagctaggtaccagatacttctcaactttctttctatctccgtagtgggctgactgatggcggggtgctgcttagtcagaatcgcaggctggacgtggcatctattaaggtcacgtggcgagatcttgtaaacaagctcttcttctacggtggttagctagtgcatcatggtgaggaccacaccttcttatatcgcaaactgcattcctgtttgaatacaccaatttgagtctcaaaacttcatgcaaaatacatgaacaaatatatcggcgtatcctaattaggactagtgcgattgagttacttgggaaacaacttcccaaggttggaaaaggtacctaaactgaacacccccaaggttgcttctcattgtcacatctatgctcccagtcatttttaacatgtcttaaggtccttcccgggtgtaagctacgaagaaatggttggaggctcaaatttaagtgagggccctatcgaagcaatcggattctcgtttcgtatgtgtcaattgttcaacagtcttcgcatttactcttatggctgccgatgtcctcgcaaggtttcatacaacatacctgttctatttcgggtggtggaatcttccgttctaccttgtgggccatcgtcatctgttccatctcggcgcatagatccaacagatgcaatcatggcattgcgaatgtattgcacggctccaatgcctaattccgctccacgatccacatagacgtcctacgaatcgtcaaaggtcttatcatctactagacttgatggtagctggagcccggaagacttcgggccaaagtacgtagggtgagagtccctctcgcttaggagcgagctcggcgcactcaatccaaatgaatctgatctttctgccaacgaggtcaaaggatcgattctttcatttcttgtggttctcggggtgtcttaggggctcttagggctgagaggtggaggacactggttggtagtgactgcgaactatagctagtggtctagtaactactaataactactaatcgaattaggtagacagcagcaaatattgcacaggttcattcactactagaaatttgcattactgacagacatatccttttatcatgtacaggatatgctaagtgatatgctaagtgttgaaaggactgtggagttggcgtaacataaccctcaccatatccatcgtgtttctcgtgtccatagaacgctgcaaaaacaagcaaattgcaagaatcataagaattcgtcaacggaaccgaaaagcaaaaagcgaaagcgaaagcgaaagcgaaatcgaaatcgaaatcgaataaacatggtctcgtaagtcatgaaaagcgcgaaaatcagatggctcgcacgtaaaacaatctagtaagatatctgcggtgcctcatgaacgcggtaaggatttccatcacggtaaagaggggtatggtcgttccgggaatcggccgtcgaaggggcatattcgatctcatcaggccagcgatgatggcgagagggtgggccctggctgtgagcgcggcgacgctcccgcttaatcgcacgttcggcgcattcctcctggaaatgggtgttttctttgcgcttttccatgagttccttccattcaccataggcacccttgatacccagtgcagcgagaccaatactcagggcgtccttggcgttagcggtcatgcggcgtttgcgggcctcctcgggcgtgatctctccctcctgtaactgcttcagtcgctccttccttttctcaatgctagtgtagacactgtgcgcagcgtggatggtggccacactggccaggcctcccgtcaccaacatatcccgcttcagcttcttccgttgcttcttctcatcagaactgtcacctaggtcagaatcactctcggagctggagctattgccgcggtccttagaaccggcaccgcgcgaagcactggtgcgtgcacatgggggtggatttcttccgtccgatgaacggtaccgacctacatctctcgagcctttgccccgtctcgagtccctgttgtaataatcgctttccgcatctgaatccgaataatcgtcgtcccgatgtccccggcgatgacgccgctctcggtcgtcccgatgctcccgacgatgctcccgatgctctttacgatcgtctccgctatcgcggcgacgttcttcttgctctccgccgagtcccagggccgccatgccctgaccgatgtagtccgaaacactcttgctgcgcttgtgggaaccacggtcgtcctcatcactgccacgagaatcactacggccgcgatgccgagaacgtgatttcgagtgtgattttgagtatcgatcatagatttcctttccggcagcagcaagggctccagtggcagcgaggttcttgagaccaccacctgaagagtgatcccgaccacgagatcgtgagcgcgaccgtgaaccgccaccgacaaagtgactggcagccagacctgcaagcgtggactcgagaacatgacgtgttccatgcttgctggggtctctgtcgacaaggccgtcggttccagcagcagccacagcggcagtgaggacgcgctttcctttcgcaccggcccattcgccaggctctttgcgttgtttgaaagcctcaactgcaccagctgtcaaagcggcgcgagcagcctgagcgatgcgctgcgtgcttttatcgcgtttgctgctgccgccacgatggcgactgcgtgaatctgacggtgaccttgagtacgatcgatggtgatggcgggactgggaacggctgcgaccacggtcgccgcggctggaagaagcagcggcacccccgaggcctatggcacccagggcttgatcgctgaacgacttgcgacgtctgttgcggggtggagagcgacttggcgaagaagaatcagaatcatatctggagcgacgggagcctgagatatattagaattgatctcaacgaaatctgctctatattactcacgttcatcctcgtagtgtcttgggcgacgaggaccagagcttcggtagggagcatcgtaagcgccgactgaggaggcacggcgcacattttcgtagacaggtcgtctcgaccgccgagagtcataagaccgctcgtaggtatagtccgagcctggcggatagtcgcgctgtatctcctcgaccgagtcgttgctggcacgaggcacatatgagtctcgctcgtgtcttctataatggccgcgaggttcatcatatggatcggcgtaactggtggggcgtgcgtagcggtcgcgataacggtcctcgtagtacgccatggttgaggcgaaagtgaggacacaaattgaaagataaagtcgatatttgtgaactactaccgtccacggggaaaataggtgggatggaaaaagaagttcgtgaggggagatgtatagcggggctggggtggcgtgacgatgtgggttcagatgggcgagcgaagtatcgtatctggggctaagagacttggcagtggctgagagagatagccctggagtattctagaggtgatacttggatgaaaagtacaaagttcaagggacaattctttttaaaacggtatatatagcaaaatcaggattgcgccaatgacgtacaaaggaacagcgaagcattcttcaaagcggatataacgccatccaatatcgaatgagcatctggactggcgttgtgtatcagagatcagataggactccgacgtcatcctgcgtcccaggacggtctagccctatataatatacacaaaggcagacaattggataatgcttaactgcttaatctactttcaaagagatgtacacccttggaagtatacagtacatctgagatgcaatatcaaatatcggagattaagatttatggaacgtaaacaatggttccacgggtcgccttcgggggtcccagccgcttacgatctggccaacacgacgccctggatctcgttgggtgcagaactggttgcacaacatttctcatgggaatccctgaagggaagctggacagtatttggctctctaacacatcgccgcccacaatttcaaccatcacacataacacgagaatcagcacatggtacatgagggatataaaacagggaaataataacacatagtaacacgtatgatagacctagacgtcacaatgatatgaaacgcgcagtcatgcagaatcgctgaatatgaaatacaaaaacacaaaagcacatccgagagcccaaaattgaccaaaagaaaagactaaatagacatgatcgaatcacaccgcacagcagtggccaggcacaaaagacccaacagaaggagaaagtcgtatactaaacagcaaatagaatggacggtcggcgaaaaccgacctgctttcttagggcgcctggggaccaggcactgggacagaccctgggaccggccgtgcacctgcctcgataggttgactgacattgcgctggtgcgagacggaggcgtataccgcgtcaggacgagccatcgcccaccgagcatcaggctccgactcggaaatagagcgcatctcgtccgagtgcgagcgatgggtccggatgtgctgtttcatgttgtctttcctcgtaaaggctttgttgcagatcggacagtgcacgctcttttcgccggtgtgctttttgccgtggcgcgcagcatggcccgaagtcgtaaatgtggaagagcacccatggctcgcggcataggggcacgggtacttgttctttcgccccgtgccgcgcgtcgctccggtctgagaagccgtttcggatgtggttgaacgagtctcgggtgatgttcggggagctgctggcccgcgagctgggaatcggtatggttcccgtcgcggatcctgccgggcatacgggtggtaagatgatggttgactggtgagatagtcgtaagctgagccatcggacgacccgggcgaagcgggctgggcgacgtccgtcaccgcgtctgaatgatgcctgctccctcgtggtgatgttgctggagattgggatgaagctgcagggcgggtatactgtgggtcgctgataggagagggtggtcgctctgaatgtggatattgtgatgatgatatgtgagtccgactaagtcggggcgcggaacggaccgcaaaagatgggttatcatcattattcagaatggacacaatactcgtcctacaagtggacatctcctcaatgccaatgccccgatatgcggtcaccgaggctgggaaattatactagagacaaaatgaagttagtttagactgttggcaaccggctcagccgggctctgggaactcgcaagaactcgagagatcgccggtctgagacaaggggagaaagggaagagggtgtagaagaagagaaagaatatctctctcatttcttgcccccccggaggacccgacaaacgcaccagcggctctcgaaatatgtttgtcctctgtgtcgtgtaacacgtcgacaacattagaccttaaatgggcactcgcctgcagacctgaacggaggcttgagcttgtgccgggctccgtgtcttttggaggcacgggtgacgagaaagtatctcaaaggttgttgaatgccggagatatgacgacttggcagcgatagtgcaaggtgaaatgcgatagacgtctttccctcgctgtagaacttgttcaaaggctctggtcctcttttttcgccttttcttcctaggatttcctttttttcctttctaatttctgcaattgtatgtggggaacacaatcctcaacggcagttgcaaaccggcctggggatgttgcagaaaagtcgaagttcaacgccggttgtctaacccaagtcacagttcttccagatgttaggccgtctgggaataagtagaaacgaaatgcgctctgcgcgtgcccgtgatagaggtagtggaaatgagtagtcggatacgagataagaggggattgaaatgatgagaagtcgaaacgagataagagttcaaataggaatatagatcgagtagagagaggaaaaaagtgaagagcagccaaccatggccatcggtaactaattatactaaaaaatgagcgaaagaagccaagctccagggtctgtcgaggctccccagagaggatacacttacggagcacgctatttagttcggtggagcccttcaaaaagaaaaaagaattaatagcgataatataaaatgctaaaaacaaatatctacaatacaacaacaatacagaccaagacccctaatccacacccttgtacccgttttcttctccgtttcttccggcccgcccgctaactactccagtgaggtctgtgacatttttccatttttatctgattcttggacttgcgttgctttttttcccttacgtctaaatataatactgtatgtgcagttgggagtgttaactccgactggcttatcatgcggactagggcttcggctgggccaagcgaaaacagggagagatccaccatatcggcagaaccgcgggcaatcatgagaccattggaccctgagcaggttaatgactatctttgcggatttatggatttagttttattcttggcttgagggagataaatcagaaacggacaagcttttagccctgtctatacgtattcgtcctccgcgctatagctcttagactacatttctctctggggaaaggctcagaacatacgtaagtgatgatgttagtaccttggcctgtttgggaactcacctccggcttgggattccatagcgggtattaggttcaattcgggaaatcctgcgttgattggtggctttaggttcttacttttcccaaaattatatctttgttttattccgttttccttcttttgctattactgcagggcgatctcgccttacggtaaaagtaaaaaaaaaagtaaaaaagataaggcataaaaggtctagccctgagatctccaacgcttccaaggttcaggtttcaacgctttgataatccattaatcataacgtggctcccttgcttgtcggactttcgctttcttgaaagagtactttgcaccgagatttcttctttttccccgagataacccctcgtaaaaagttacgtggacgatggaggtatacacgaggattgcctccacatgagtaaagataccctagtgaactattcaaccgaacctagatcttctgtcacgtctgctttgaacattccaaatgatttacatgggagcccagggggtgaaagggactggcccgtgcaactattcgtattcgtgttcatccgccccgctccgagaatccattcgcggggactctctccagggctgactttccctctacgttgtagcacacgtactccgtaagtcggtatataatgaaacagactgctttcagaggttaaaggggagtgacatgtttagcagagatagagcgacagatctgatattgtaatgacattatcaaccgtgtaccgagaatactctatgtcatatcaattccatttccattcatttccctcgtttctcccgcaaatacctcgtggcaacgccgatcaagccaagcttcaatcttccgatctactggaactagcgtcagaattatgttgtccaaaattcgtggctggaggacgcggaccgttttgaggctttctcagccgagaggtgatttgcctatactcgatctcggacggggccatacgtatgcagcctacgtatatccacggtagacgtatatccggtagttcgggatgtctagtgcagcaaatgcgcttccgtgcttgtttcgactaaggatttagtgttcggatttagtgttcgagacacttctcactcgccgagcttacgccacaggcttgattcgtcagggcccttgtactcgtcttgtttcgaggtgcctggaaagaccctgttttttattttcccttgtttgactaggatgcagggcctcgtggcccgcttactacgatgagactagtctggcgtggaccagtagcatagcgggtgctatcatcaccgttcccgcttagcggcatgggataccctaattgtgctaactacaaccgccactttttttggcccacgcggcctttttatatgcttacgtgtttcaacccttaacccttgagctagttagttagggcgtacggagtacggtgtgcgaagtatagaggcgcagaaaatttcacttgaaccccgacaccggagattttatatccgaatgtccgaccaaaaagaatttgatctccactcggtttccaccatctttcccatcttcgaatcagaagggcattttcagctgccgcccgtccaatttgctgcctgatgtccagattacagtcggtaagcatgtgtaagcatatgtaagccaggtaatgttcacaagtcaccggcatttatgcttaactccatagagacgatccggcagatgccttcccggccatctcccagcgtggagcctttcgcttccacactcgtgttcggatgctttcgcgctattgatcttgtggtctatttcgaggatctggagccacttctgggtaattatggacctgtgctgagtcatttatctaggattctagttcctgggcatgctcaacatatgaacaggttcctggacccctgcttacaaagcggaggaaaatcgcccgggctatcatccgtatgtgactgtgggtatggacttgccatacataactcagggctaactacggagttccattctccaaaatggatcaaccggtcccttgcaatggtctgagcgcccacgtatgataaccccaggtatcgcagtttaggctactgtcaaacctgggaaatccattgaatattcactttgcctcggggagctctgttcttgcccgtcccagtaaggagacacacattctaattcctaacatatgttttgtcgtattccgagacatttgataattacatctcaagtcaaccaaactgtatatcgaacgactcatcagatctcgcgtagtatccgtcatctctcaacaattccctcctattccccagttatctaagtttatgtgcccaccttgaattcgcgcacccaattgtatttagtggattgttgtaattgacattcgtactagtaaacaggaaaacacaataactagcccaccttctcaaaataaacatgctatcaatatccggccacgcggaataggcataatcataacctccattatcatgcgccaccttgccaataaataagggttcggccggatctggtcattggaggtggagccgaggacgtataaaaatggatgacgagagcgtacaacgtactctaatctaagtgcacgcggtgatatgtggctgagagaggcgcagttcatacctgacgcgaacacctgggtaatccacgacaacgactttagtacagcgatgcagagagatccggtcttgataagattgatttaccttgattttttgcttgttttccgtcccttattggctgccaagcagccattgagccttagcgtctctacgtatggtgtactatgaatgaagctgcgtcagcagaaacgtcattttggtgggctatctatgctccatactggtgtcgcgcgcatcaagggaaattacttcgaacagaggttagcccctgcatatttgggtggggagatatggcggctacctagagatggtggtgggagtctcggggagttttcggggattcgccgagcggagagggacgaatacggaatgggggtcgtattgcgtggaagaggggttatattgttggttatcttaattatagatgttcgtggaattcctaacaccgttctttctatgatgttagacgttggttctacacctaatattatgattgctggactattgactgtcagtgtgccggtatcgatacaaccacgggtctcttgcgaacaccccttaaactgaaacgtagatgagacagctaggcttggaaagctaataaggtgagacatctggttacaagctaacggcttcggtgcagtctaaggaataccatgccccgcgagattgactcttgtttcatcattcccacttcccctctgatcttgatgtggttaaccagcagaatacaatcgagttgagttcttcaaacgcaggtaataggtatagccctcaaataatttggacacacattaagtaatagaaccatgctgacattcatttatcaatctcagactgaacagacaagtttctacgtccagtccctcctctccaaatcatgcagtaccttgatcgtaactcttcataaccacctacctatgttctggacgctataccatgcaatcagccaaagctaatcgtctagcctgcctttccctctatttctcctcttcgtcctttatcccatacccgagaaggaagcaagtccacccttctctccaaggccgagacccgcacgcatgtcatccgacctcgaaatgaaagcgaagccgttcggtgcgacacacgggcaccagcacccgggtcctgcgtgtgacgagtggccacgcaacgtacagcaaacacaatgcggggtttgtcaagagacaggactttgtgtgatgtgacatatcctgaggctcgagggccaaaaagggtcatgcgaaggtccggcagaatggaatcgcgcatctagactactggatggctttcttctggtggaaggggaacaggaaggcttgcatcgctctcggagtagcaatcggcatcgcgggagagacagattccgctagacctgcgaatgccgacggcgaccaattcttctatgccagagctcgaggcgtttggaactctgtcttgcttggcttggattcctcgcggaccagtcttttgctcgcggaccagtcttttgctcgcggaccagtcttttgctcgcggaccagtcttttgcgtcgcgttgtcaagtgctgcgtggcatgatacaatgaagaagataggaaatgcgatgcaaggcaatgaattcaaagtcaggacaagtacggagtgcaaaaagggaaaggtaacccttgactttggcgttattagcaccacactctaagcaaccgagttatagaacccggttgttccttccaaggttggcaactatttggctttatcaggaaagtacaaggttagggctgaactttacaaaaaaggaaagcgcgtttcacatcgtttctctacctatacctacacatggataacagggaccaggggttgctcgattaacgaggcaccttgggctgtttccatcttctgtcctccataccaattacaattcctcatctgtcataccttcactatcatgaaactcgtcaaaccacccgattggttctagttctatcacatatataacatatgcatggtcctgaagagataaccccatagcattatctccactatacgaagctacagccattatattttccaagatccaaaagttgactgaaccctagtggtgtaattatgacaccactcgctagggtccaattgaggctctgttcaagtttcatgcctttacccacaccatctgacacagcttccaataagtgattgaccgccgataaacagtacatgaataatatatttagaatatggtcgacaacatgcctggccgatctgagattcgatttaccgattcgatttccagcgctgttcatgcaatagcaaactaaaaacggactcagaccagtggagtcaatttcagggaagctttcggccggctatccagagttggaaaattcgccgatgaaggatgggggcggaaatgttttcccttgctcctcagcctatgagtcgagttcttggtttcttcattcaccatcgacactgtccgagaatcattgaaattcagccgcaatcagatttccttgttctactctcggcatccaaacacctggaagtctctgatcaacaaaatgaatcgcatcgctttcagaacccatgttgtgggtagcgattgcggagataatgcggagcactaggggctccattcgagggtgggtttgcaagtcttagggtcgaggctatttgtagcgaatcgggctctcaaccagaccgcatcgggtcatcctcacagggcatacaaattccacggacctagacagcttaaaagcgctaggattcatcgtctcattggcctatgcagcgacgcgcttgttaatcttacttttgtggaagacctggtccaacagtcttcaaacgagacattaagaacggggctgcttactatcctcgttccgaactctcccgccgtttcactgtgattcgctccgtctaggctgtgcaggggactgtatcggcccatatataggcgctgtatagtaagtacaatatatagtgcggttaacaggcgcatcgcaacaatctcttgaatagcctcatgtcagagtctagaatcgtctaaaaataaccaagtaccctgataaacaagatctcagtacgcttctcgcttaaaatgcaattaagcccccaaataagcaaaagcgcagaccgacatgccaagcagctaaccagtttacgatagggctaggaagaacagtacactgcccaagtggacccctctatttcagccccatgaccccttttccctatttttatctgtaggatgttcttgctttaagacggttgtcgttcttttttgttttccgtgtctgtacggagtgcaagttccacgatggcttcgtcgtgggagtcgcaacactcgctgctatccgaagattcgatcgacgctcgaccccagcgttcttggaatccactcaacaaccgccgcactgactcggagtatcgctaccatccgccctcagaaaccacatggtctgaagaagtcctgcacgagattgggctaggcatctcgtccgccgacgccattccaatagaacttccgggagacaatcgccattcaaccgatagcgctgcgactacaactccatatacctacaagatcccgcaattttcccagactccgactccgcagactccacatgcccactcccacgtgcggtgccctaatcgaggaacggtcctccaaaaacggctctcctgggtcccattgacagtcttggttctcgctgtctatgccaccgtcttttcaggtatctttctcggcattgcgctgcgtaagccccgatggcgcaatgtgtccggcgatggaccagtggctccatctacagcaaccttgttgagctcggcttttgcaaagacgatcgaattgtcttatgttacgatttgcgtcgctttcctaggccaggtgcttagtcggagggctttgatgagggattctcgaggaatcagtatctcggatatgaatatgagggcctggattatgcaacccggatctatgattgtgcattgggaggcgctgcgatattcggcgctcactttccttggggcgattgcactggtttcgacgttcgtggcgatgctatataccaccgcggcgcaagctttgggtaaattattcctcttccacaacttatgtcaaagactaatcaacgacagttgctccaaagctcactcttggtcctatcgagccaaggttactcgagggcaaggtaacctccagcttcgcgaacccaaaatacatcgcatcggactgcgcgacacccgtgaccaacgaaatggacccggagtatcgcaacacaacctgcattcagattgaacatgtcggccacgcatatcacaactaccagcaatggataacccaatggagcgaggtagtaagcagccacaatgatacctcaaaccaactgcgaaagcgcccacagccgacaggctcactatgggacaacaccacaataacaggcagctggattgatatccaagatatgtccgctctgtccaagaaacacggccgaatggtcaacaacataacaatggcaatgccgcatggcggcatccccgccgcagcaatgaactccaaaaacaaactcaaacaacccacagacacctccggtgaaggcaaatacaacatcgaagcctccgtcccctcgccagccattaatgtcctctgcacaggaatgacgaaagacgagctcaaacccctagtctactccacctggcccggcggtcacaaattcaacatgacgacgtggagtacctcacccccagacgacatccctcgagccccatcctggctgaaccgcacagtcgtcgactcgctcttccaattcggcccgaaatacggccaagtcccacccgtcttcggcaaatacccactcccatacaacacgatcctcaacacaacaggaccctggcccgcaaacgccatctacctcctcggcgcgacgccgccatccaacgacagccacatgcccgagtacgtgatgtgctctatgcgcgggaagcaaaccggcgtgtgctcgaccaagtactccgccgacacaagcggcgccttcctcggcacaaactgcgagagcgcctccaacgacctccaatacgaccgccgccaagacgtgttctacgagggcgagtggaacccagactggaagaacatcgcagcggagtgggcgagcgcgctcagtctgaattcgggtatttcagacggcgcggccagcaacgccagactgctgatgcagatgatgccacaatataacaagaaagaagggactttcgcgctggacccgactctgccgtctatcggcgaggggctggcggtcatggccgggagcacgcttattctcagctcgcagaacgcgccgttcgtgccgttttggaattacagcattgagaataataatgtgcttcccgagcctgtttaccaggtctttaatgcttccatccaggcgtttgggtatgcttccggtcccacggagaagtggcaggggattttctacgtgattcttgtgtttgcgttcctgaccagcgccatctgtcttgggtttatgattttcgaggcgcgcgggcggcaggtgactgatttcacggagccgcagaatctgttcgcgcttgcggtgaatagtccgcagacgacgcagttgaagggtgcttgtgggtgtgggccttatggggaccagttgaaggagaggtggtttattgggatggaggaggatgatgagcattattatattcgaagtaaggcggaggagaagattccgttcgtgcataagtcgatggactcgacgcatttggagccgatggagattgatgatgggggtgggaggatgctcagccctatggtcaatgagtttaggaaggtctcgaagcgccattcgtttttggcgaggctctattgaagagattcctagtacatctccatttggcggttggatgcttatgatccatcactgatttacgataatggttgaatgtaaggagtaatgcatatgacgacagggcatttcaatagcatggctggagcatgcgcttgatttcaataagtgattaacactaagatcgagatatgtacaaaataacatgaacacaacacccatacaagaactagaccggcacagtaccggcatagccctcgaagtcaaaaaaaaaaaaaccggttcaacaggtgtggcacaacgctcgggaatcgctcatacacacaaacaaaaaacgaggaagatgctggatacagataaaaatgcagcatgtcaaatgcaaggacaaaaaacaatgggctttttcaagacaccagtagccacgtagacgccatgaaaggaatgaatgagggagataaagagattcgccaaatgacctagcgaggtgaggtattttctgaggaaagagagtgagagtatgggagagttgggctccaaatagactctgagtcggaataggcgaccgtgtattcaacgatcagccttgagattgagccagctcatatctgaattggtattgttcttcggcccttccatcggaagttcatcgatatcgtgtggtatgatgacgctggatcgtcgtgcattggactgccttgccttttccgcgacgccggcattcgatgattcccagggcaaatcttgcgtgctcgattggtagaagctggtagtgtagttgctgcttgtgggacgtccaagccagctgttctggcccgcaccttgccactttggatcatcgcggtcgtcgtggtcgtcgtccgaggtgacactgattgaatctgcgctggagatgcgtgccgattggctctcgggaatcaccaggcttcgactgcccgtctcagatgggccattttccgtggtcggactgccgctgaaaacctggccgaggggcttgggctcgtcgaggaagccaaaattcaatggtgtcaacgtggtcatcggccaggcgcttccgcggtaatcggacttggtgtatccggagctgatagtcgagcggttggattggtagttggtggcaccgccgtcctcgaaatacttcccccacccttcatcagtcaatcggtcagcggcttggtttccacgcccggtgtcatcgccgacgttgccgtcgtcggtgtatatggttggtgggcccatagcaccgctggagggaattgtagagagtggactgctggtcttgggctgaggagacaatccatagcccgtattcgtcggtggcttgagggatttctctccgtagttgccggacatgatagccaatgagtcgaccgaagcagcggctagtgggacaggagatcttgccatggggtaagcgccttcggtcaggggttctatgccttgatcctggaagcttaggcgatctttattatcgccaccaccaccgcggccgcgaccgggttgggcaagctgcttgtctttcttgcgtcgcagtatgaaaagaatcataagcagtatcaaaccaaatcctaggatactcccaagagttgcgccaagaatcaccttgtcatgttcagtcagggtgccacttacagccgcagctgatgttgatgaggcgggcgtagttgaggtcgcggttgctgtggatgacgaagttgatatcgaagtagacgtggtggatggtttgaggacatcttgatctcctgttccataaaacagctcggtagagttgacccatgcgttcgaagtctggttgaagattgccaatgattcattacttttgccgctggcgagaacgacaaggccattactaccctgggcgagcgtataatcagaccaggatactgtcggggcgaatgtgctgttataaggatcggtgagacccctcttttccgatgatccgatgactgtaaccgggttctgcgcctttcccttcgagctgagaaggtagctagtggcactatttggggaagcaaccatcttgaactcctcgaggaccttggtcccggagtcggaagcgagcgcgcatagcgatgaggatgcgattggattggggagagtcgtattggagatggcccagccttgcttatctgcagcctcgtagatgaagatactaggattggtggcagagcctccaaccaaggctacctctgaagaactccaaggcaaaatgatgggctcatataatgccggcgtgccttggtcgaccgtggaactcacctcaaaggtagacgagtttgttgaaatgaggtatgtcgactgagaaacctgggtgctaccgtctgtgtttcctgcgtaaaccagtatttgcgaggtcgaggatatgtatccaacgccatgtccaatccgatctttcatctccgttgatggtaatgtctcccactttcctgtactgaacaagaagcgttggaggccgctactgccggaggagccggtcccgccgaccaggtaaaatgctttcttgtcttcgtcattttcgatgttgtcaattccaccctggacgcaggcagggccagtaaccatatgctccggtgacgggagctttttccatcccttattcttttcgaggggtatttttgcaaagccagtcggcgaatagacgtagaaagtattgttgtggatagtggagcaatcgccctggatcttgattaggggttcgggtccagtcatgctgaatggtccaaatttgattgttcaaagtcgcaacagattctggaccagtaatgaaggtaggtggccagccagaaaaggacttgaactatccaaattagagaagtaaaaggtgactaccagagcactatctcatctcgaccgccgaggcaagtgagtgaacaaaggcaacagaccacactcgatttgagctagttgacgcgacaacaggcaacgtgaacacaggtttctcggctgttttccgcgcggttaactgcgctttcaagttctccggatgaacctcaggtggatcgcgtatcggatgacgcggcgactcgggatggcacaatcagggtagtggttcaggttgtcaacaatgagaatcacaacaccaacgcgtcggtcaaagagaacatcgagtaatcacaaaagtatgtggggctgggcgatctagtcgaaaggtagaaaacgaaggaagggccaacaaaacccgattaagcgaatgaggggtggttggcaaaaaagaacgaatgctagaatatcaaggtgcgcagcacgagggtaaactcagagaaggggaggtaaaaggagaggcagaacagagacagaaaccacacgatctaagtgaaacagggaggagggcccctcaaccccctaacggaggaggttagcagacgggttagggggggttagcgaacaacgccatcccttaaggggaataatatcgtcattttcaattcgtcaggtaactttcccgttaatttggtttttttcactttaattgggtctgatactcattcttattactttattcgctctgattggttcgtttcgccctcattgctcctcttctatattgatcaggggggttcccgacaaagtgggacacctctcgttgtacctggacccccgttttacagcttggctttgacttcctagatttccaattcttctagggcgaatctcgggatatacaacagcaagggagactgcggatgtaacacatagcaatattctgcacataataacagaatcgaaataaaataaatcagttaaaacaaaacaaaacaaaataaaaataaacaaccgctcttctgaaccttggtattccctcaagagaccgtggttcctgtccgttggatccatggaaatttcaaaactgtggcgccttggcgtcccacctccaaggttcttcctctataattccactttcctatacaatgctgtacaaagtataggacactctaagcctcaatatcaaatgttgcctcaaggtatccattccacatctgactcagggattatcaaaatcagcgatgccctgttttgtaaaccggaagagctctaggatttctaatttcactcacaagtgtacagcatatagaccaattttcaattcatacgattaacgaatattaactcatcctcatgtccctagaatctcggctttctgcaatcattccacgccccttttgtacccaagtccaaagatcaactattacgcacgagcatgtgctaattgtgccgtagaaattcttcctgccaatttcgtaaatgtgatcgacaggctgatcagaaatatggcaccccactatttaaaagagggtgctagttagggtctaggcctaacgttgacatcgatccgagcgagcacttactgttcttggtaggattggaaggtaggtagttgtatgaaagtgacgctgacctatgcagtctcaatggctgtaatcgagactatgaaaattgtatagaaatcagaacaatgtgaacggtaagttcatcaactgaaagcgagaaggatgtgtggcgcgtcactgctctcgttgttgatagctcatcagggtcgaacattagttagtaccttgatggtagttgtatgtctaactgactcaagttactatccccgaaagaagttgttcgagtcgccttcgttctatggctatgatcctcaatgaacgtagttgtattgttatcaccattattttcaaagactacgagaatatccatatttacttcaggtcttagcgtctgcaatatatattttctgttcgatgtcccgttttgtgcgcaaatcattctatatatagacgtctccgctggagtacaggtagtctggctcaaagatggacacgcataaaagattttccaatgtgcatttaccttgaaaccatcagccacagacaaattaaacacttgatgcgtctgaaagtggcgtttctggcaagagtttaaatgaagtctctacaacatatcacatgttctaatcggggcatgcgattatcgactatagatagccgccaataggcacaacggatcatctaacaataacggatcgctcatgatcgacaagttagctgtcgatctctcctacgaaggatcaatatgcccatcgtggtcgatgtttcgagtgtcattactcatttaataggacttcgttaacattgagctatatatatatccgatgtcactacttgagatgtcgatcgagcgaccctttacctatgtacatggtagtaaaaatcaaattatctgaaacaaaaaacagactatgttctatataggaatggattgttcaagaacgtgctatatatgttgtaggatagagtgaaaggaaggatttcgggagtgagggataagatatggagcatgcatggggctgtggagctgtggagctgatatgcatgtactccggatgtttcgggaaaatgtctcagttctccgtgttttgatgatacagattaggcattaatgtggatagaactacggagtatccaagagctgtatgtacacatctactcttatctcatgatctgctttgtgagctgttctagtatcaatggcggatgacttcctgtttagattctgaaaagccttccgatctctaattcagccgacgcaggtaccattacagagatgtaccacaaagccagccccgccctctggaggatttgatatggccagcatgcacgacatccataccgcatacttgtctaaatgtaggggacagctaatttggaccctacatatcgattcgtgccgcttagccggcgaaaccgattcgatcgaatgagacagtgtggttcggtttcattgtcacacgcagatatcgaaaatggtattctggtctgtattatagcacatgaagtccgtcctcggagtgggcttggatggatattttcatgatataaagatccaaggtgtcaaagcaggggcaaatatgggaatcaattgattttgtaaaatgaaagctaccacgcgcttcaagactggttctgctgcttccattggtgtgccttttggagcagacgagaaagattggccgcagattgatcgtctgcagggaagacatggtctgtgtactcctcgtactggtcgtccgccaacttgcggcgcttcttgacaagtcggggcatctgtttatcgatcttttcaatatcctcgcgcgatccaaccgcatgctcgaattcttgccagttgttgagaatatccacacgctgtacacatgttagaataagccgaacaccgtgtaaattatgggaatagcaacttacagaatccgtgagacccttttctttgagcaccttgtgtgcccgagcaaagactgcacgcgcgcgggcctttgcgtcttcggtaatacctccctcctcttcttcgtcctcttcctcgcccggcacagaggcttcgaagcggctgtagttgacccataccttgacgtgatcggttttctgaaggagacgttcgtacaattgtcgaactcggtcatactcgccttcttcatcttcaaagtcaatgtatgccttccacacaagctcgggcatgtcaagggtcggttgctcgatgccaagctcgaaaatggcccttgtccgttccgcgtcgtccagatcatgctccagcttcgcgaaatgcatccacgactggctgttggaggggtcccattcaatttgcttctggaacaaagtgcggcaccgcgcgaactcgaacaaccggcgttcgatgctgatatagccacggaaaattttgtctttcggacacattccaatagcttgacccaatgtcttccgtgctgcttgtagttgcatctggcgaacttcaaactgtgccttcaagagccagactttgccgaatgtgaacttcttgtgcgggattatcctcagacattcctgatagatttgtccagcgcgttccatgtccttcgcttccatttcttcccacacggcgtagaagatccatagatagatgtaccggcgccaatgtcttttctcttgtgatgggggaatctgtgcaatggcccgttcgtagatgtcccgcacccgctctgggtcacccgcagtttcctccaatcgggcaaagtcaaaccaaatgtcatagttgcgagggttctccttgagctgctcttcatactgcactctgcgtttggacaaaaccacatcctctacaccttcacgatcaccgtattgcttttcgaaggtcgtgtaggccttgtgaagaagcatagccttggatcgcggaagccggtctagggcatacttgtaaatcgctcgtgctcgctcatactccttcaacttagcctcgaatttggcatatgcgacaaagagcttctcgtccatgaagtcctcccctaacgtttcgatagccacaccgtagacctcgcgaactaagtcacttgtgccgtactcttcctcgaagcgggcccatttgatccagtttcgaggctcggggtggacgacggtaaatcgctggaaaatggcacgtgctcgttcgaactcgctatatctcttctccattttgatgtatgcgccccacgcaccctcttccggctcccatgaaatccatcgctcgaacacttgacgggtaccagggatgttgcctagtgtctcctccatgtagacatacttataccagagcttgtcgatgcgggggaggatagtcacggcgcggtcgaggaggttgcgggcatgattaatattccgggtcttcatctcagcttcgatgtagcgaatccaaagcaccaccgaggtcggatcgacgtcaagcgcacgctcgaagatggatcgcgcgcgacggaattccttttgttcgagctcccaggcggcatagcgcatccagttgttcatattaatgcggttgcgttgtacatagtcttcaaagtcctttcttttccgaccctggtactcgtgtagttcttcaaggtcggcaaagcgctgtgtcggcgcctcaaggccaggctcttgccggtcaacggcctcgcggagaagttgctccgcagagatctgaactggcgcggcggccttgttcttgacccggggagggccacgggaggcctccattttgatggtgctgtattgactgatctcgctagagaggtggtttgtgacttaaaagattgtaaggtgaggttcggttcggggatgtcgaaattgtcgggcaagtaatgatggttggacaaaaggaggggtttgaaagatgaagttggcttcaccaaatcgcagcgaccgcttaactcagaaattgacacgaaggtttctcacgcctaatccagtgacgccgagggtagcttcgacccgcagctcagagaatccgcgatgaaatcgccgaactgcgtgactggtctttatcgccacccgcgcacgtagcttccctatgactaatcacaacttttcttccaccttagaactctaggaatatcgttgctctcattctagtttccctagtggcgttctgggaccacgatcacaagcacctcatacacggcattggacccgtcggacaaattccgagtcaagatgtcaaccgctgaagagcttttacgcgactttgaggatgacgaggaggacttcgatgtgggcgaaggcgaggaagtcgacgaagagcccgagcaacaggaagactccaaggaaggcgccggggcttctaacgactttgatcgctctatttcaaccgccgatgagctaacacgcctacacaaagtcctgcgcgaccattactccattcgattccccgagctcgaaagactcgtcaccactcctataaaatacgccaagacggttgctgtcattcaaaatggccccttcaacgacatcaaggcgctgtccacatcatcagagaatatggttggcgtcccactcaagtcagtcttggacgggccgtctctgatggcagttgcgatggaagcaactatcactaaaggccgggaaatgaccgagtctgagctcaagctggttctcgatacatgcgataggattttgaagcttgatcatgagcgtgctgctcttaccgcaagcattcagtctcgcatgaaccagatcgcccctaacctggcagctctcatcggggcggaaacggctgcacaattcctcaaccaaacaggtggcttgcttgaactagctaagatcccgtcctgcaatttgggtgcacaaggatcacgcagatcagaaggactgggctttgcgaccaatcacggtgttcgagcccaaggtttcctctacgactcgccacttcttcaagaggttcctctggacctcagaaaacaaggaattcgaattgttgcagccaagatggtactcgctacccgcgcggatgtctccaattacgccaaggacggttctctgggcgaagaactgaagcaacaatgctatacgcgactggagaaactcaccgaatctgcgccaaacgccggtaccaaggctctccctgcgcccgatgataaaccctccagaaagcggggtggttggcgggcacgaaaggccaaggaagctgtggctatgacggaactacggaaggcacaaaaccgtcttgcattcggtaaggaggagtcagaggtgggctacggcacgggctctggaaccgttggcttgggcatgctggggcaacaggacgatggtcgcattcgtgcaactcagatcgaccagcgcacccgtgcccgacttagcaagaacaacaagggctggggcacaaacacccccgctagtggcactgcctcatctttgcgtgggtttggccagggcggtgcaagtggcactgcaagcgttcttcaggcacgaggtattcgtgcatctggcgtcggatcatctctacctggcgccgctggtacctctagtactattgcattcacacccgttcaaggcctggagctcgttgacccgaaggtgcaagcggaattgaagcgcaagcgcgatgctgaggaaaatcggtggtttaagtccgggacttttactcaagctcctcatcagaatcctggcaattcacagagtagtgaaaatggcggcttcaaggtgcctgctatcccactcaagaggaaggctgatacgggtgagggcaagatgggccctccgcctaagcgttaaagacttcatttgttttctaaatttcttgcttgattgctttttatcgcggcattttgacggcgtttcagggggaagatcaggaggcctgagcttcaatatgatttacgtgataccaaacccgattgtatattagatctgaactacagtcctcaaaatgacatctttttaacggcggacctgtgaatctcctttttttttctctaatacgccgacataaaagacctttattgactgtttgttctctttcaccaaaccagattgtgcaattcgagctaggctcttgtaacagaggagagtcgatgtcatactgattctttctgtctttgaaatcatttaaaatcagagtttgtcctttcatattgaaatcctagtgccaagatacgccagttagtctctttgtttgcctggtggtgaaaggattggggacggcaggtttcctctccatttgagaatgtttccagcatcagtccatttgctgtcgccaacttgagaaatcagagaagaaattgccccgaaacactatgccggacgatcgcattgatccacattacacttagcccctggttttgttgactgatttatgtgaatcgagccaagcgaagcttagtgggcttgtcaagtcaacactcgaggacgatctcaagtcccattccgaccagtattacggaacatctgcccaagctgaaattgcaactcattaagtcgaggtcaaggtccatttatggtcaccacctcgtcgccttctagagtctatcgcccaacaaggtccacgtcgtgatagtcaaagcaatctctatgcccttgctatcctagcatatcgatcgggtcgaccaagaatcatcgcagcggatgaagcaaccaaacgtcagctgtcaggtaaatttctcgaagatcgtaatctatattcaagaagagaaggagggcgcatctcggtgattctcttatccacacgcagggatcccgattcgggtgagtgttctgttttcgcaagacgagccgtgtgctccctacagaaatcatgttcaatatcgacggcctagaaaatgagtttggcgattcagatcttcaagcaaagctgttcagatccgttcataaatcatggggacccttgcgggcccatggtcaaagatggaggggaacgacgttatatgacccttataaagaactattcaagcctgggacggcagatattctaggaagagagcactatgccaacgctgtgatcactgccctcagtcgctatctacccatcgagctggccatctaattcaaacagctccccgatcaagatgccggtatggaatcgtcgtccaagtaacacacatagagtcatcttcctcctgtattctcaacacccgaggacgttgagaatacgtatcaaagactaaaggaggctggtccaacaaagtatcgctcgaggttcgcaccagtggcaaataggaaattcatttgggagatcgagaggtacaccaagcctcccatgacactagaacttgtttcgtggggtataccgcatgaagacccgtcgagacctcgtcaacttctagaatgaatatcgtgtataggatgctcgattggggagaatcgaaaatgaagtcctgccaaatgaagtcctgcctttgctctatctccccagaccgctatctgccctggacgaggcgtttagcgttcttacaagcaagctccttcgaccaaatttattcttcatgagaatgaaaatctccgatatttgcactgacagggagaggtgaggttctcacgttggccctcgcaaacacggtatcaaagagataggcatctggacgaactatttttatcgatctacctctttggctacctatcatcgcgacaaattgggtttgagctgcggtcttcctcacaaacaagctaagcaacgccgcaaaacaaacattgaagcagatcctcgtcccatccgttgaagtggattcggacgggtccagtgatgatcctcaagatgatccattaggccccgagtatttaatcataccttggcacaagaacgctatggtcgatggaaaggtggaagatatataggagcttattcaggagctttatgtgcatcctcatctgcgcggaaaacgcacagtatcattcgtttgtgtcgatcggcagtttgaacttgatcgatcgttcattctgctccaagcagatgagttcaattctgacccggggcatgatttactccaacccttgcccttcccgagcctgagagggttcaaatatacgcgtgcctctactgggttggcatttcttgaggccccaaggcaaaacatgatcgattttgatgcagtggaccatgattggtcaaaatatcgaagaccgggatggccggcacctggggcattgcctgatgactctgtagaggatatagagtagttgacgggagcgcttacccttgaatttaccagtggaatgaatctatggatgacttaagctgagttgtttcgttccaaggttcagttaactactagttacatggttggctacatctgtagttagttgtatgggactatctgcgttgacatgttggcgggatcacttcacagcgcaagagatggtgaaatgaatacgtgtgtaaagaaataactcgaaggatttgatcctttatgtaagagaatgttcaattggatgtcagaggtaagcccaacagacccaatcgacgacctaagcaaatcccaaatttgccgcccacattgcgtgctcgtccaagcacacaatcgtggaatgtggtacagcatccacggtatatagcggtcaggggagtgtatataaaagcctgtgcctgcaattttcttttcgatattgcgtatataaaattttctataaatttaggttcgcctccacgttccgaacttccgccaaatcctatttcttgcgctacttgggtccccaatttcttatttccctcaaatttggaatctttttaaattagattcacagagatttcgaagcatgacgtttagcatagccaaatcggtcctcatcaacccagtcccagctagcaaaagcctcccagacaagggcgaagggcaagaggttttaagcttaactcgactcctgcatcacagccatgttactacagaattcgaccccttgagatttgaggctgccgcatcattgcaattgaaattgcagctcgaggggcaatacccagatacagaaacagatacgcgactcattgcgtcgccctacaacagcgtcccccatctgctggacattgctgcactggaaagacaagaccgactatttgcattggcattggcatatctcaaacctatccgcgacgactatgccaccgctgactacaccgaatcattcaactggaccgaggtgtatgatttgctgagagtcttctcacaggccgaaaaccacacatggaaatcacagtcatactatgttgttattttccgatcaatattgttgccggatattgactcggaccgtctttatgatctcgatgcgcattcgcaccaggaggccattgctagtggcgggctgttgaagtattggtttggggcgaagaatgacaagcatcgaaatctggccacttgtgagtatttgactattctatgttattctgaccacatgctgatcaattcgaataggcatttggcgcagtcgaaatgacgcgagacttggtggtcttggaccttggcatgctcaggcaagagcggccgctgcagtaatgtatgagcagattcggttcactacgctaaggttggatattgcggatggagtgcagtcctggaagctgagttattggaaggaagatgtgctgtaaatagcatcgttggcattagcaagattagatttttgcatttgatgtggtctagaacgacatgacattgtgaacctgtacatctcgatgaatggctaacaacaaatattctatatacgataaataagacgaaattaacgatgatagacacaattctccctctgatggcgagaccaatgaaccatcaaagaagaatgttaaaaagaagacaggaaaagaaacgagcgcaggtgagccggtgatgttgttgatcttgtaactgtttctcgcaatccctcgtgtcttctggcccatacaagacagatcatgccctgatcaatgcaatcaatggagcctatgatagatcggagctaaagtcccctcacttttcaatatgggaccatggaaagacaagcaaggtctctacacaatgccgcggcgggtgcaagaggtgattgagagagatggacgggcttcacagtattaaaacaattgaatacagtgattaataataaattactggcaggataatagtggagaactacgtttgtttcttggttgccctgtagaaagaggacaagttgaaacagaggagtatgcaagcatgggacagtatcactccatcattccagtcagtttagattgtaagcccagtgagccctttttcttggcagagttattatgattccacaagggcggacgcacttgattcgcaggagaatttatctctggaatgcgttctgtcgtaactagggatcgacataggcccctagatccacgaaggaactctttgctcaaggaaaagttattttgttataatcaaggcgagctcgtaagacgagcatcttatttagaccatcttagctgaagaaagcaaagtttgaattgatctacaagagaaaaaaaaaaggaagataccctgggagtgtaaacatcggcattcaagtactatataaatcctcattccaaatgacaagagactggcatttcggtaatttcggatcgcgtatccgcgtttcagacgttaaatcttataatagttgtgaacttgagatttatctgtttccaattagtgtcaggaaaatatctcattttcaagcatccactttatcacaacatacgcccaaattcatacaatatgtctcaagttattccaagggcatcatggctctcactcatcgtggtagcactgctggcagtctccactgtcaacgcacatccagtccaccaggcagacgaagagatggaaaaaggacacaccggtaaacttgaatctcgatcaccggttagtccctcagacattgcattctgccattaaaaagcacacttctgacagaagtatagagacttattccagatacccagaagtacgttcatgacatcttgcaagggttgggcctggaagagccaacctcaacctcaacctcaaccttaacaccaaccgccacgcccactgccagcgtcaagaccaagcaggactcggagagcatgaattcaacaaaaaccacggagattacctactccagctctaccagttacacacccacttatagcggcaattcggcaagctacactcatactgtgaagaacgtgcacagctacaacaggccagtggagaacgttcagcttgggcatggttggaatggggataagaaagttactgttgatgatctcccagctgcctttgatgctttgtataaggtattggagcatcgattgaaggatgcaattgacagctctgatgagattggattggatgaattcctgtgaggatgtttagtgctacgaaactcgaagcgatggattattgattctggaaaatgtgaacttcaagatatactatgtactactaatgtcgtattaggaggctatagtccatgactgtaataatatcgctactccctacattatcggtgttccctaaactcccttaactccgtgttccgatcccaactccggaaattagcagtacaaatccgcaggtgatgccggtaacccggacgagaagttcgatatccaagttattaacatgatggtttacattgacggagtgatcgcacgaagcttgcggtgaaaacctgtaactacgatcaatcgatccaaccccgacggcggggcatcttgaaccccataaaaggcccatcgcagcccgccaacctcgactttctaccaactatctcttctcaacaatttacgcttatcatttacattcaaccatgccttctatacttggaaaggaagtcggctctattggctatggcacaatgagtgcgatccccctctcaaacacccacaattggcggacacttcgctgattataaaatcagggatgacctggaacacgcagcctccatcagaggaggtgtgcttcgagacactcaacactaccctggaattgggtgccaacttctggaacgccggcgagctgtacggcactgcagattacaactctctgcacctgctcaacaagtacttcaccaagtaccccgagaatgcagacaaggtcgttctcagtgtcaagggtggcttgaagaagggcgagcttgccgcggatggctcggaaaagaatatccgtcgtagcgtggacgagtgtctgcgtctgcttgatggcaagaagaagcttgacattttcgaatgcgcgcgacaagaccccgcgttccccgttgagaataccataaaggttctcgcggagtatgttaaggagggtaagattggaggaattggcctgagcgaggttgatgccgagacgatccgccgagcgtatgtgcctcttgattttatagtcgtcgtcttcctatggacaaactcaactctaactgcttctctagacaaaaggtgcacccgattgctgccgttgaggttgaaatgtcgttgtggtccaccgatatcctccataatgacattgccaaaacctgcgcggagctcgacatccccgttatcgcttactcgccacttggccgaggtgtgctgaccggagctgtgacctcgctggccgatatcccccagggtgattttcggcaccacatgtcccggttccaggaagataacttcaaacataacctgaaactcatcaacgaggtcagtagccttgctactcgcaagggtatcgctcctgctcagattgcactggcatggatccggaccctaagtgagaagcccggcatgcctactattattcccattcctggcggtactacgaaggacaaggtggttcagaatatgggcggtgcacaggtgctgacggattccgatatggctgagatcgatgctgttttggaggaacatacggtttctgggcctcgatactaaggagttcctgcatgagtttttatatttattattagagatagatcagaaatgtgatatgtgcataatgccaatgggtatttgtataggtcagatcaagtgtagaagagtcaacatacaatctcacattaataggtgattgtcaatattgtataattcctcggaattgatcatcatatagtatgtaaggcagttgagaggatccagtgttgcgtagaattcattatatagggtagtgcgcagggcgaaggcgagcttaccattgggtcattgtgatgtactaatagagggggtctgagtattactaaataaatgaatagcatgacagagacgaagattatgatcaacgaatacatataagaccatggaggaagaaagagagggagattagcgttcagttgtgacctcgcagtcgatcacgtgatcccgttcatccacggctgaacacgtgatgtgatacgatggcctccctcgcgcgacatctacagtgcagctaatagacagttcaaatttgtttgctgccacttccattttcctatacgagctatgccatccacaatggcttcacgagactctcccggttcccctctctcctcggtgggatccctcgagacttcagatcatgaatccatgaaacatgaaagccgcgcgcattctccctcgatgtctaacatgccgccatccaagcgtcgtcgcaccggtggcgcatcctgggaccgtcaaactcctctctcctctacccatgacgaaaaccacccacctccctccccgactgcctcgatctcctccgatagctccggcgatattcccaactcccctagcatccttaccctccttggtaccaatcaagaagatgactacagcggccaaagcaccgaccaggttactatttgccgatgggatggatgcaatgctggcgaccttggcaacatggatgggttggtgcagcatctccacaacgagcacatcgggagccgacagaaacggtactcgtgcgagtggacggattgcacccgcaaaggtcaaacgcatgctagtgcttatgccctccgcgcacatatgcgaagtcacacccgcgagaagccattctactgcactctgccgggtaggttgtctcagacccagactcgagcaaacagatctcgagtattaacaatgaaatacagaatgcgaccgcaatttcactcgctctgacgccctgaccaagcacatgcggtctgttcacgagactgacactatgcgcccgatcgactccatctcaaaagtccacggcaccccgggcagcactactggcacccctgcctcgaagttgcaacgcatccgcttgaagctgacccagcccagggagccgggaagtgagtctgagccacacaccgaagcaatcactattgtgccaactcccacccccatcataaccgacgcacacgatcccgacgagacctcgatgccagagtttggcccggagctcgacttcgacgaatcggagctcgccctagctccgcgcgacctctaccgtcttctccgtcgacagatcgcgtgggctggcaaggaggccacacagctgcaagccgagtgggaaataattcgcccgcagcgcgagcaagcatggcgtgagaaggaggctatctttgacgacctcattgacgccgagattggcttgttcagcgcaatggtcggctcagtaccccccgtgcacctaacgaccagcctcgaaaagttgcaacagcagcaacagcagtttcagaatcaacaggagcagctggccaagtcggcagaggtgccgactatcgagggcagcacttagttggcttgtcttccctttcttctctcttttctctcctccccctgctttgctcctcctttctctcaaccttctctcccctgagaccatgctttggtagcttggtctcagaactgtgtcactctgtggtcaccttttcatttgtaaacctctcatatcccggcgtgcatggctttggtgaatgcgttgtgtattttcaacccaagcagaaaagaagtgtcctgcaacggaatgtatgaatagcctcatttctttctttatttctttcggtctggcttgcaggctcagtgacagctcaccactatgggcgatcactacaattatcaataatcaagattttcttctgatctgggaattataatgcaaggctacatagcagacagaggccatgtctagtcgtcaatagagacctaagttttaagacactgaagaggacgtagccctgactccgagtgcctatcgaccctgaagggcaagtttaagaagtcattagaaggaaagacatcaaatggcgtgccatgttgagatgtgttgagacgtgcggtgacgattgcgcaattccatcgagttatacgtgacgtttctttaagtgccagtgtcgtcgggactaactatatagcttatattcctaaacttatttcttttcttcttctctgttcttctgtatagataatctaagagctatgaagaatctaactgctgatgagcggtaccaactggcaggagactactttgctcctaaggggctctatgagtacaccaaaagcctacccttcactggtcgagtaaaaagtaatgttaatacacttgtggccggggaatggacggagatcttgctagactatgaggttggcgcatcgggcctagcagatggcgcttggataaaggccaccttcaaattctactcggtgagtgaagaagcccgatagagcaggctgcagacttgatccaacatgaccgagataggattgggtactgttccagacatcagatcccacaaaagacaactatatcagcgccgagtatatcccaaacagccttttcccagaacagacacccgcgacagttcaatccctggccattcgatttgatcaaaagggacacgagcgacctttccaaaaagctgtgattgtggatattcaagatggctatatgaacccaggcgatcggattctgattcgactaggtgatcgtcgcttcggcggccgaggaacgcgggctcagacattcatcgagaaagacttccgctggaggttttacattgatcctgttgggactaggtgagtagtattatgacagcatcacagcgattgaatctggtgaaagctgactataccgccatagtcgctttgctccgattcagcctgacctctcttggaacatcgtcgctggtcccattcatcacctccaaactgtttctcctcgcgtacttcagccctctgttccattttccattcattctcataccgaggatatctggggaaatgtgactagtgatctcgagaatctttccttccagctgaaggtgctagacgaagaccggaaggccatgatcgtcaaagaaagttctgcatcacagcaaggctggacgaatgttctctggtctcagcatcgaagttgacggcgactacaccattgaggttatcgttaaatcgaacgagaaaaccattgtatcccaaaccacccaactcaccatttcatctggtctctcagttcccaaggccctcttcggcgacttgcacgtgcactccgacgacacagtgggaaccgagtcatcaatctacaacttttcctatggccgagaaatcgcagccctggatgttctaggatacaccgccaacgacttccaaattaccaaggaacgctgggatgccacaacagacttaatcacatcgctcaataagccgggcgagtttgtcattttcccagggaccgaatggtgcggaaactctgcagcaggaggagaccacaatgttgtcttcctggccgatcccgctacacacccgcccgaattccccttcgatcgccatgggaatgttgcccgttcgtttgaatggtccgagcatggtcccaaggacctcgtccccggagcttggccattggatgaggtatactgcacgtatgcgcgcaaggcagatgaccatatcctcattccccatgtcggtggacgccggtgcaatctggcatggcatcatcctaagctcggacgccttatcgagattgggagtacatggggccagtttgagtggctcctccaggacgcagtacgcagaggatggaagcttggagtctctgctaattctgatgagcaccgcggtcgatgtggtggcggtgttcctggcacagcagtgttcggcacccgaggcggtctcactggcatcattgcccccaagctcgagcggcgggatatcgctcatgcgttgagagcacgccacaccttcgcaaccaccggtcagcgactagtaggactggtccagacggcggaccagtctgctatccagggtgacgaaatcaagattgccaaacaagagacactagagctgaaataccagttctttggtgagaagggattctcgtcaatagaggcttttaatgaatctggcctgatctggcgaagacatttttggtccgagtctgacgcacccgccaccattctgcgggtgacatggggcggagcgagattatacgaccgctatcgtgaagctgtttggaacggaaccattacagtctcagataccagcattgaggatgttttgccatttggaggcttcgaggacaacgcagaagactttgcacgccaggcgggagaaagcaccgttgaattttcaagcaaaaccagcggggaccttgatggtgttcatgttgtttttcagggcaccaagcccccgcaaaaaatccgtatcgcaggctccctcggtggatatgtcaaagttggagaccccttggctggaaacccccacaaagcccagcctacattcgagctagaggcctcttgggaggaggccaagcgcctagatggaaaggtcatcgaaatcctgggtggtgcggagctgtttgtgcgtattgaagcaatcccgcaagtggagctgccacggcgggttcagggacaagcatcattcttccagacaggatcacgctcgatatactttgttggccgagagtggagtggagaaaaggtggtgaccagccctatttttatagactatgtatgaggctaaggttctcggggcttgaaacttggacgagatacctaaagtcctccctgtaatgtcagattgctgtatgccgtagtatattatatgtaatggtttacagatatagttgtagtcttgaatagtaattcatattgaggctaaaatgccctgttcttacgttggctccaagataaaagtgaatgtcaaataacaccccactgaatgatagcaggaagataaggaaatcagtcgacgccattacagccactccataagatacatgtgctgagagagaaaacaaactgcccttgattacggatacctccataggtagaagccctgatatgcccacgacatacaagaaaagcaaactaaagcaaaggagatatgatatgattggctctatccaggcaaaaaaaataccatagagaaccagtccaaaactccccaacaggaaaacatagaaaataaaaaaaaacctccagacaagccatgcagtgatcatccaagaccgtgctcactccaaaaattcttctttttgtgctgttggggctcacgcaataattcgacgccatttgcaatgccatgcaacaggttgcatccgtatgtacctttaaagaacaaggagaaaaagagagagacgaaggtcacattgataggggcatctcaaggaattgtgcgagatgttagaacatggtcaataaagactccaaaatgtcgagtccaatataagaagattgcaggtgggtacaatgtagtggtagagggagtagagatcgccaaaaaaaaatacgctgagtgtctatcataaaaaaatgaaaatgatagatagatatttgatatcagaaacgctgaacgtgcatatcatcaaaccgtgctaaagtgaagttgaactgaaacaaagaacatatgtacccattgagatacggaactcctcaagccgagctaccattagaggccttggaagctttactggcttccatgaccttattgaacatctgctgcagcttagcaccactggcatctttattcggccagtagttgagtgaaacataatccctgaaagtcaagtcagaacgggaaaagagaattgtgatagcaaagagaacttaccagagtcggacctctagggagggcatcgattgcgagccctccagagtattacgaatgaattcgccaattttcactagggtaaggcgaagtttctgggcccgctcgtttttgcttgggtaatttttggcagtgatcattgccacttgcttcaaattggcaacaataggcttgaagaacatgaacgccatgtcttctttattagagccgccgttctcatgccctttgcggcgacgaagctcgtcattagaggcatcggataaacgatggcgtggacgatcatcaaggccagatcgtggacgagagtcatggctgggagtatgatgacggtctccctccctgctggcatgcgtgtgggggcggggacgtgatcgatcggattcacggtggcccttgcggggattctccggcctgcgagaactagagggtgccggagaggcggagacactgccactaccggaaacccgtgagccacgcttgttgttgcggtggtgattgtcgactgcccttctcgctgtagcattgttgttgtacttgttccttagaacagacatgagatattcagctcgtcgaacaaggtggacagcgcccggtgattttgtcgccttctcctcagtctgcaggcgctgtgtctttcgctccactcggtgttcctcgaggaagaatttgtcgccaaggccaagctcagtgtcatcgcgaatttgggtccacgcaccaaacccatggcgtgcgatgccgacaagaagcattccgtcttcacgtgcaccccattggcagctgtagtccgccaatttggtagcctcggggagtcggaatgtcctgaaatcagccaatgctttgatgatgcttcggataaggcgcatatctggtggacgttcaacgatagtccatgcattgagtcgcttgactccgtgatggtcgaacaagacggccttctgttctttcttcgtggggtttctacccgattgtttcatggcctctaattggtccagacttgcttggacaagcgagtttgccttggcggtgatttcatgaagagcatcacgaacggtgcctcgatcgcgagtttgtaatctggcatcctccagaatgagatcttcggagtcatccagatcgccgtaacgaaggaatgctcgagaaagtgcacggtattctttttctccgaggggacgcctgggatccaacgagggactttcttcctcgccatcgtcgatattgacttgagctcttgcgagccgtttcgccttacgttcctctcgtgaatctgtcgtgtccgtgggggcgtggcgcttgcggggtcgattttgctcaatgacttcagcaagataatggtcatcatctttacgcttttcctcggccttgagcacttcgagctgttccttgggaatgatgtcgtcccacgtgagatcgtcaactttgatatcgacgaagtcaaacgctttcaagaattcttcaccgccgtcggcttgaatttgctcagcctcttcggtttggtgtaattctgcgtttgcaaggacggaatcaatatcaagctgctccagcttcttctggttgtcggtttgttcgaacatcttctggccgcggcgcttgaggatccgagagatatcatctgtggaattaggctcggcaaccacacgagccattttgttttgcatctccgaggcttctttgtcggtgacaccacgctggatggtgatgaactcgagcaagagcttgttgcgagctctttcaataacttcttcttcgatcgtatcctttgagacaagacgataaacgctgacaggccttgtttgaccgattcgatgagcacgcgccatagcttgcaaatctgcctgggggttccaatccgaatcgaacagaacgacagtgtctgcagtcataaggttgataccgagaccacctgcacgggttgaaagaaggaatgcaaagtcggtgctaccgggagcattgtaatgctcaattgccaagcgacgggcagcggacgggatagttccatcgagccgttgatatttgtaaccacggtactccatatactcactcaggatgttaagcatgccaaccatctggcagaagatcaacactcgatggccatcaacgctcaacttgcggaggagttgatcgagaagcatcatctttccactgctggtgatcatcgctcgaagaatatcttctcgacgagtactaccttccaggatctttgcttctgcgttggggaacataaatgggtggttgctagcctttttcaattccatcatgatgttcaaaagagactgcttcatccccttgttcccgtcgttgagcgctgcgtagtttttggtcaagatattcttgtagtattctaattggacatcggagagctccactcgaatgattttctcagtcttcgggggaagatccgactcaaccttggacttggtacgccgcaacatgtaaggctgaatggcggtagttaattccgcgagtttttgagacgctgcctcggaattcaaatccatgtcgacgtcgacttcaatgaggcccgggttgaggaaatccattaatgctgaaagctcagcaaggttgttttggattggggtaccagtaatcaagaggcgtgcctggcatttccattcgaacaacttcatgtaaagttgtgaatcgcgattcttgagacggtgcgcctcatccactgccatgaattgccacttgaattggccgaggaagggtgagtcattcattgcatactcgtaagttgtcaacagaacatggaactttggacgtttgggattcccatcgaccatcaattcataatcgcgcaacacggagcgcgccttttcactaccattgtaaacaacgtagttcagatccggtgtccagtgatcaaaggtatcagcccatgccggcatagtagacagggggacgatgacaatgaacggcccttgctgccgcctgacatggcgcatccagttgatgaatgcgacagtttggactgtctttcctaggcccatctcatctgctaaaacaacattgcgacccctaacccaattgaaagccaagaagtttagacctttgacttggaagtccttgagttctccattctgcaagaaagtaggggttccgtggatgggctcaaaggatttacgcgtggcgacatttatctcgttcttgtcggagataggttgtcgagcggtgcggtccaagaatcggtcaacctcacgctgtgcgatctcagaaaccagatcctctggctcccaagtacaggaatcgtagagaagacgtttccatttgacaaggtattccgtggtaccatcctcgctatcacgtacaccaatgacccgttcaacctttttgtagtcctctatggcctcgacgtctcgttcgcgatcgaggttccacttttcgcggtcttcaggaggggcgtcgacactgtactgcaaccgaatatcctcattgagtaccttccgaacataattatccacgcgtcgcgtgctgcggaagttggcaatagattcattgctttcccatgtagcatgatagtgtgatttgtcctgccacttgatacaaaattcaaagtcgttgcggtcgagatcatgagctttggggtcgacgccctccttgaggcggtgattcaggacgacgtcgacagcggggcgagtgtcctccacataactctccgcccagtagttttgtggaagatcttctgggtcttcttcaaacatggcttcgtcttcctcgtcatcctcgttgtaatttgacaccttcttagcggttcgcgttgagaagcgaacctcactcaatgaaggctcatagctagcagtttgttggagacgccgccttctcgctttgctggcacgagcactctttccaccatactcatcactgtcagactcggacagggacgacacagtagccgatcgagaggccttagatggttgctgggatggatctttgcgccgacgcttagtacgtggtgcaacatcatctgagtccgaatcagatgagtcggcgagatggcgcgtcgtgcgagcacgaccacttcgtcgaagcccatacagatcgggattttgtctgatcaggtcggtctcgctgactggtgacgatttgcgcttcgcaccgcggtcgggatgaggagatgaagagttttcacggctgtatgtgttggcgtcataatcgctgttgtcctcagctacgtcctcattttccgcgtccgaatcggcagacgcgccgtcataggagtcgtctgcggcatcgggttcgggggaggactcggagacggggtgggactccatgggctcggatggactgcgctcatgttgccttaacgtatcgccatccgcgtgggtatcgtccgcgacgggcgagagagggtagccattagacatggtcgaggtagaaggaggttcctgagcaggtgggatcaccatgccagaggctattaccgaggggcagtcagcattgaagcttgattcgggctaggagaggcatgaaagagatagggacgggtaaaacaatggcacgcgacccaaattgcggtcaaattgagcctaaaatctagcagaatgggacaggatattgacttcgatgaaagagtatgttttttgataacgggtgggatggacgcggccaggctggaaggcaaagcaatggacagattgatacacacaaccagactcagagaaagcagtgacacgctgcttgaccgacgacaatttaaacctgccccaatcggaatagaatagaggcattcaaggattcgtgcagtgggtcgacaagcgcggagaagtaccgcggcgaatgcttcggtcggcacgtctgtgcttgaggaaaagattaaatcacttacactccatagcgtggtgaccccgaaagcgggggatctgtcgatcaatgtgggaaagtaaatggtgggggggaggcgtgaagctggaaacttggggaggaggagacgagagacttggaagaactaagagttggggactgactggagggtttgcttcggtttggtttgcaggaaagtagacacccgatctattaggcatcaatagagcgtaaccctattgagactagcttattcgcttggcgcctggcacggcgtcacatcacgtggctagcggagctcggagaaaccaccaatccgaccccaggtcagtagccaatcaccgccttgataaataagtgacggatgtgtggcctaaggcatcacagcccacagaaagcaaagcaaagtgcattcaattctgccgcccctcgttcgttgatagtagtgtttcttcctgtcttatttctagtcgagtctgcgcagagatacttggtgcttttgctgagcccggttcatttacctgcgacagcgcttagtcggccaatctcaaccccccgcccctccacttggtgctgattttttttttttcaatccgcttcatatacacggtttctttgaaccacatccacccaccatgtctgacaagcttactcggtatgtttatggagcctttgaagtgcgatatcaccagctaacggtatacttctctttatagtattgcgatcatcaacagtgacaaggttcgtcgcgacatacccccactaataatattttctccccggttcatgaataactggctcacacctcatctttccaactttacagtgcaagccgaaggtacgcgattcgatataatatttcattgtgctcagggaggctaattagttccagaaatgtcgtcaagagtgcaagaaggcttgccccgtggtccgcacaggcaagctctgcattgaagtcgatcccacttctaagatcgctttcatctccgagcgcctgtgcattggttgtggtatctgccccaagaagtgcccattcggagccattcacattatcaacttgcccaccaacctcgagacccaagtcacccaccgctactcggccaacagcttcaagcttcaccgactccccatgccccgtcccggtcaggttctcggtctggttggaacaaacggtatcggaaagagtacggctttgaagattctcagtggcaagctgaagcctaacctcggtcggtatgacaaccctcctgactgggaggagatcctgaagtacttccgtggttccgatttgcaaagtaagcaccatagaccaagtacagcggtctttattcgaagttgctaactgtgacagactacttcaccaagattctggaagacaatctaaaggcggttgtgaagcctcaatatgtcgaccagattcctcgtgctgtgaagggacctattcaacaggttcagcagcttatctcggggcgcgctgcgctgggtaacgaggaggagattatggatgttctcggtgcgttgacatgctccaatatctcgaaattcgcttgctaatcttcgtccagagttgagacaagttgcgcaccgtgatatcggtcacctttccggtggtgagcttcagcgtttcgccattggtctggtttgcgttcagaaggccgacgtgtacgctcttccttcattagaattgatgccattgaatcctttaggttactaataattatctaggtacatgttcgacgagccttcctcatatctcgatgttaagcagcgtctggctgctgcccgtacaatccgcagcctcctccgccccgacgactatgtcattgttgtcgaacacgatttgtccgtcctcgattacttgtccgacttcatttgtgtgttgtatggtcgtcctgcagtttacggtgtcgtcactctgccttcatccgtccgtgaaggcatcaacatcttcttggacggtcacatccctaccgagaacctgcgattccgtgaagaatctctcaccttccgtcttaccgaagcgggcgaggagtttattgcggacaaggatcgtgccttctcctacccctcgatggagaagactctgggtgacttccacctgaagattgatgccggaaagttcaccgactctgaaattgtcgtcatgatgggtgagaacggaactggaaagaccactttctgtaagatgcttgctggtgcattgaaacccgatggcgctatcaccatccccaagatgaacatcagcatgaagccccagaagatcacccccaagttcacgggtaccgtgcgccagctcttcttcaagcgtatcaagactgctttcctctctcctcagttccagaccgatgtctacaagcccctgaagatggatgacttcatcgaccaggaggtccagaacctgtccggtggtgaattgcagcgtgtcgctattgttctggctctgggtatgcccgctgatatctacctgattgacgagcccagtgcctacctggactccgagcagcgtattgtcgctgctcgtgtcatcaagcgtttcattatgcacaccaagaagaccgctttcatcgtcgagcacgatttcatcatggccacctacctggctgatcgtgtcatcgtcttcgacggccagccatctgtggacgctcgtgcccagacacccgagtctctcgtcggtggttgcaacaggttcttgaagagcttggatgtcactttccgtcgtgaccccatcagttaccgccctcgtatcaacaagtacaacagtcaaatggaccaggagcagaagctggcaggcaactacgtaagttttctaagttttctatctcatctatggatgctattgattccattctaaattccttgctaactatattcaacagtacttcttggaagaagagaattgaaaagggcgttcacaacgagcatcgtcgccgtcgtcacaaacatgacggccgcgactatgagcagcggcgcaacaggcgccgcggcgattggaagatcatgtggttaatggggatcccaggcgtttgcagagcctcggcggttcagggcaagggataccgtcgccgcgccggaccctcttcaggtgccgatgacggtctctcggacgacgatggcgatgatgacgatttgaatggcaacagtgaccccgactagaaggtagtgacctggttcacaccctgctatccctggtctagtacgctcatttacttatgcgacctgttgccattcgtcagtctatcaacaaatgcctacatcgttattcgccttgcgacctgccttgatttgctctggatttttttatcatatccagagtcatcggcccccggttgggaacacatgcctacagatcttccactagcacctattaaattttaatggtggatgaggttcggcatagtttttttttccaacggagttatgtttgcattaggttggaggggttgggttccaaaaaaagctctccatgaattttatgatttgtttaaagatggaatgtcgcgtcggaatggattggcgatgaggttgttttcagaccggggatggcatagaacaggaaaccgctgaaaagctgccaggttcgttgcctcttcgtcgtgtagatagatagttttcaacccattgttgtgcatatgcttctcttgttcgtatttttgatccaacatatctctctagcaggcttctctagccacgcgcaccccgaattctacgaagcagggacactgccgcctttccttttgggtcgaggtagccatgtggataggcaagtatgatatatgattctgtagatatatatatagagagagtaccagtatacaagcattgtgtacaggagtgtacggatatatataatctgggagaaactggccatatcctgccagggagtcaaacggacaagtgggatctgacttcaactctttgagctatgtatgtactatccacggggagactataggtacacattggggttgcggattatttacctacgctattcgcgggggcgagccaagcccgatatatacaaaccgaaagaggttccttataatttgataaagggcagcatctgctagaagtgcaattagtgcggcattaggagagacattacgagatactcaaatggctcagaccctaacttttgacattcacccaagcgggagcgtgagctcggattatctggtgtgcaagtcggagtagtagatggtctagactggattactgggcctggaagaaagcaaatgagattgcaggatagattcagctcaatatcctacatgtgggttgaagggcagaaattacttgcatatggtcaagcgtgaatgagaatgtccatccccatctactcctcttcaatctctccttcctcgctgccagagtgaatggccttctcatctttcttcgcatcctcgatctcttcttccggaatagcggaccgttcctgtcgggggactctcggacccttgctgcgctcacggctctcacgtcggtaccgcttacggctagccacactctcggtatcactgtcacgtcggcgtcggcggtcaccactggccacactgcgagtgtcaacagcaccagtaccaccaccataatcaagctcatcacgacttccacggggatctccacgagtgcggtaaaggcgctcgcgttcgtcttcacgtcggtctgggtctctagcgcggggacggtcaaagtcacggtcccggctacgataacggtctccacgctcatcgcgacgatcacgagatggggagataccgctgaccttgcggtaagttcgttcgcggtcggcctgtgccttgcgacggtctgcttcgtatgcatccatttccggggtccggttggtctggccgctgggtcctcgtcgttctcctcgcccactgcgatattcacgatcaccgcggtcataatcccgtcggcttccacggctttgagagtgtacctcacgctccctctctgcatcctcatctctttctttcaagcggcgaattgctttttcaaaggcagactcccgaatttcatcggactcaatggccttgtattcgtcgtatttctcaaggcgaggttggacttcagcccaggtgtcggtgacccggacaggcggctctaggcgcttgatacgagaacgcagtgcgtccacggcgcgacgctgttgacgatcggctgcatgcttttcatcctccgtacgtcgaactgccttgtcttggatgcgctggaaaatgagattgagaatctcagggtcaatcttggaggtgcgacggtcggcggacatgatagaattgaattcgtcaaacgtggtttcagtcgtaacttcaaatcgcttgtcctagaatcagtttgttaggacatatagtctttgcttggatccgagggaaacttacatccagaacatcgagcacgtcgttccgaggtcctcgcaaagcgcgttcttcttcctccaccatatcccagaacaaatcaagaggggtcgaaccaggctggcctaggatgccatgatatctggggtcatccttaatgatcgggcagatattcatccacttggtgcccgccttgatcttaccctgggatttgagctccttaaggagggccacgaattgctctcggttcttacgctcctttctggttctggctgccttgtgttgctggcgagcatcgttgaaagcccgctccagggacttgatatgattttcgaaggcaatcaaaatgtcagacttggtcagggatttgaacttgtcatcggtttggaacttgctgtcagactgaatgatggcatgagcctcggaccaacgcgtgtatggctccaggttgagtgaatccataatggtcatcaactcatccatggcagccttgtgcgtgacaaattcttgctcggcgtgagccttcttgagttcgaggatgtactcgtcgaaaagctggcgtctctcgtcttcctcattggtagacctgaaggtagtctccccctcaatgatcggtcgaatcgtcttccagcggctgtagtattttatttcaggatggcgcttcagcatagtgttgaagtccgcgcgaagcttggcgaatcgttctttcgcccgctccttttcctgcatgcgaacctggaccacgtatttctcgaaggctgccttgcggtctcgcggatccttaagagcccggtactgcgggtccttgatcgtagcgcgcattgtcgcgtcccaagtccaatcaggctgcacgttgtggcgcttgagcagcttcatgaaggcgctctccgcctcctcgagagtatgatagtcggggtccatctgggacttgtattctggagcagcgaccatgctgttcgtttcaaacgagccgtatccaccgcgtcggtcgttgtatccccgctcacctcggtcgaagtcttcacggtcacgttgctgcagttgcgagaaagaggctccgccggcgacaaatgaaggggcactgtgaaggaattggcattgagggaagttaagttggggaagcacttacgcgggggtcgcctggggggcaggcgcctgtgcgagcgcgtttttgtaaacttcaggcatctcccatgtgctctgcttagtttctgagtgataccagtatttgcgcccagcatccgtagtgtgctccttccatggttgattcgcgagagcaagctataaagaagtcagttaagcgcgtaacattttgcggtcaggtacgcacctcaaccggagtcatcaactcttgcggcttggtccattgtgtggctttggtctggatattgtaataataaacgcgtccttccgcattttgcgcctgctgccacagggcagaatttgggttgcggcttggatccattgtgaacggtgttgaagagactaacagagaagtgaaaacggagcttcctcaataatctccgcggctgtgcgcttttggcacttcgcgtctaccgtatcaacacttatcggttatctcctgagctctaaacagccactttattgactcctttgcgacatccgttgtcgcaatgcctggtctggagatcccaggtgaattcttgcgtcatgcaattcttgataccgtcgtgcttcatgctccagcatttgacattgagcgcgccctgagttcggccctagaggacggagctgatgatctcccctctgttctctcgtcaatcccccaacggtctctattgttctttggtatgcactttcaaaggatcagcagagtttgcgccttactcattaatagcaattagatgaatttttgcctgtccgtatcatcttgagactatctgattgctcagaaacgaccttgaaacactacctgccacgactcgaagtcaagctcgatgtctttgctgtcgatccagcagaatcagttggcgaaaacctcacgccaactcgcgatataatattctcaggaattgtcggtcgagatgaggatcccctagtagtcttcaatgaattcgaaggtgatgaaggcagtgggaatcatgtctatttggtttggaacatcgagactatactgcgtgagtgatttgaatctttggattgacatgaacgtcactaacttggttgatagggcgtccccgtattcgaatccaacatccgtcactcttattcattgcgtctgccagtctgaatccggctgacgctcgccgtcgagagaattcgggggatgactatctcccctcactcgtccccgcatcgaccaatatgctgcaatctctatccactgataaatctttcaatcataaagagcctttcctccccgcttccagactattgagggttgtaccgacaacatacgacgaagacccgatttacaatatccagcaacaacacggtcacccctttcgcgttgtgccagccgcaagcgcaaggattcgatactctcggttaagctcctacacggctataccgatgaccgtggccagtcttgactttgaggtcaccccttatctggcttgcgaggtctcctttgacaaagcgaatcttcacctgtccgagggaacgattgagtcgctttcagacacaccgggcctggctcttcctattacttgccgtccgcgagacgatgtgaccctcatgtataaacttacaccggagtatggcccagagaccaatccatcatctaccgcgttagtcagcacgctggacatatctctcgaggcagcaattcttgtggatgacgactgcaagccacgtatttctatgcagtggagaaccaacgtcgatttctcagtcgccctaaatccgaattttggggggcccagtccagcgctgcaaaggaccaaccgccctaccagtctatcggtgtcaacccaagtgggtgtgaaccctcatcgaagctcattgcgagaacgagcatattcggtcaccgacgtgggtatcacaatctcattctctggacctgttcgtgtgcaagtgggctgtgtcttctcttgggatgtttttattgtcaatcgatcaaacgctcctcgaaagtttgccttgatcgccatacccaagcggaaaagcgtggacccacgaggccatgttgctcggccttcatcgtcatctatcaccagccggaaagaggaccaagtggccgaggcggtaactgacgataatatcgtgcatgcgaggcaaaagagtgtggctggtcaggaagtggaactgatcagcttgagcacagacattcgcgtggggtgagtattctctactgtgttccttttcgtttccttctctaagctgacgttttattagccccctcctcccaggaacttgccattcgactgaactcaaactccttcccctagctacaggcccacttcatttggaggcggtccggcttgtagatgtgaacacgaacgaaacgactgatatccgagatcttccggacattttggcggatgatcagcctcgctctagttaagagcagcctaacactgtatatatatgacatagagctatagctactttcaaagtggcctgtccttaacaaattattttcctcttgccttttatggtgtgtttttaaggctgacaactcattcgagagactatatgcgaccccatatctagtttgtaccttttcattgcccggtatctcctgtttagtaactgaactgcgatcttgaaacgccaagcgcctcgaacggcgtgaaagcattactattgctccaatgaggcggtgttaaagaaagatagatagaactgttggaatcggctggaagatgaaatggagttatacaatacaatttatatccacgaagtcaatgtatacggggtaggtgtagagtaaatacaccgaggcagcaaggtatagttcaacgaatgtgattggtggaaggagatcacggggtaatcgactcggcgtcgtgactttgttagtcacaaaggcgggaatttggagaaggccagctaactacatagttatcttcttccctacatatcatcatagtaactgggattcccttctgaatattgggtattgggttcaatatccagcttctcaactttgcttttcaactgccccggtttctttggtctttgcgtcatactggcgcatttggttccttcccagaaatcttgcccatcactccgctcccagtcgccagaaccctccaacatgatctgctctgcgaagcggaaagtcctggatggactgaataagagatatatttacggtcgcgtggtatgcaccttcctaaagcctgacatatcgtcacctctcaatttgattacggctaaccctgtggtcattatcttcaagcctttattgcacacgataattttcctcgtcgagatggcagtagcagcacgccttgctaccaaattcaatacctattatgctgaaaggccaggtaagcctctttccgcctgttcccgcgggatcacagactgacatcactactgtaaatagtgctcacgaccatggtcaccaacgctgtaagcttgccgcgatattgatcaccaaagtttggactgacagctgactaaatggatgttacaggtgcttggtggtgttgccgataccgttgcgcagctgattacggccttccggacccgccgatcgcagacaagcggggacgatttcctatcgatcgagatccccgactttgacaagcacaagccctctgctgtaggggaatcgggatatgttcggagctcattgccgcctttcgattttgagcgtctgacgagattcatggcttatggcttcttcatggcgccgctgcagttccagtggttcggcttcttgtccagagcattcccactcactaagaagaacccgacggccccagctttcaagcgtgtcgcctttgaccagttaatttttgcgccatttggtatgatccgcctctagctactttgggatgtctttggaccggactgatttatctaggtctggtggtcttcttcacctacatgacgatcgccgagggtggtggtagaagggcattgacaaacaagttccgtgatgtctacctgcctaccctaaaggccaactttgtgctctggccggcagtgcagatcctaaatttccgtgtcgttcccattcagttccagatcgtaagtctcctaagttctccttgttaggatagaacccatactgacttctcaacccagccattcgtctcaaccgttggtattgcatggactgcatacctttctctgactaactcctccgaggagtcctaattgaacgctattcaacgcgaaatcatgataacgattcggggtgtagaatgcttgaagtacactctttcttatgtcaaattatttgggagtttcggttggtcagtctggctttcatgtacatggttgcccgcggacggggtttgcatttcaaaaggtcagattttgcacatttgggaataccaactcggggttttgctgttaactatttttgtgatttgacttgaatgcttcaggagaattccatgtttccgcttttcagcttttcaacccccattgtgcttcacatgatttcgttggactcggaaaacacgcaagcatgtacggagtagcgactatggaatcagtagaggtaatcttcccagaaattcccgaccccgaggctaaagagggcctttatggcccggccttccccgtatcaacgcgggcagctctgacatcagtcccgcgtcagcccgatcagttctccggggagagtcgggtacgggaaagtgaggtacctattttatagagataccttgtaaacaatgatggcatcatagtgcgaacaagtaccttattcggtggaatacatcacctgtaggtaccccgttgctacgggggtgccttttcaccggccttgccccaccaaaactgacccctccactctttaatgatcgcgagctcaccgtggcctgattaagttctttctccttcttcttcttcttcttcctttcttgcttcttttaccattgtcatatcattagccatccaaaatgtctctcgccaacaagctccccattactgatgtcgacctcaagggcaagcgtgtcttgatccgggtaagcttctagctcattgagcttcattactcgcagctcctaaccgctgactgaaacaggttgacttcaatgttcccctcgatgataacaagaacgttaccaactctcagcgtatcgttggtgccctgcccaccatcaagtatgccatcgacaacggtgccaaggccgttgtgctcatgtctcacctcggccgccccaatggcaaggtcaaccccaagtacagcttgaagcccgttgttcccgtgcttgagaagcttctcggcaaggacgtcactttcgtcgacgactgcgttggtccccagactgaggagaccgtgaacaaggcttccggtggccaggtcattctgcttgagaacctccgtttccatgctgaggaggagggcagctctaaggacgccgagggcaataaggtcaaggccgacaaggccgatgttgatgcattccgcaagggcctcactgccctcggtgacgtttacgtcagtatgtaacaccacgactctattactatttcttgtcgttcatttatctctaacatcaatccagacgatgctttcggtaccgcacaccgcgctcacagctccatggtcggcgtggacctaccccagaaggctgccggcttcctcatgaagaaggagctggagtacttcgccaaggctcttgagaaccctgcgcgccccttcctcgccatcctcggtggtgccaaggtgtctgacaagatcctgctgattgacaacctcctgcctaaggttaacagcctcatcatcaccggtggcatggccttcaccttcaagaagactcttgagaacgtcaagatcggcaacagtctcttcgacgaggccggcagcaagttagtcggcgagattgtcgagaaggccaagaagtacaacgtcgagatcgtcctccccgttgactacgtcaccgccgataagttctctgccgacgccaccgttggtgcggctactgacgctaccggtatccccgacggcttcatgggtctggatgttggccccgagagtgtcaagctctaccagaagaccattgccgaggccaagaccatcctctggaacggcccccccggtgtcttcgagctcaagcccttcgccaagggtaccgaggctaccctcgatgccgctgtcaaggctgccgagtccggttccatcgtcatcatcggtggcggtgataccgctaccgtggccgccaagtacaaggtcgaggacaagatctctcacgtttcgaccggtggcggtgcctcgctcgagcttctcgaaggcaaggagctgcctggtgttactgctctgtctagtaagtaaatgatgaaaaataggtggtgaagggagagtctacatcggctctccttttgtcctgcatgtttatgaaactgtaatgtatacagccaatgaatttccttttaattacaaactcattttccaaaagaggtctggattgtggtcttagatcagataactaagtgttgtgcttaggtacgaaaccgaagctttagctacgacgtcaagagacctcccgtggtcaattctcatgtataaggatgagaggaaattcctacggtaaataaataggaccgcaacgccatagtgtcatgaatatggttgaaccatgccaatcccattcacaactccacctcgcaacgcaactccaactgatacttccgttcatcttcctacataatatcattttaggcttgcgcagaatcataagctttgatattagtggaacttcatgataatcccgaaaccaagatctgcgctgagtaatgaatcgtaaaaataagtcaaaaggaccgtgtctcatttcctccccgacaagctcccgaaaagttcctgacaaatgcatgtggcaataaagcttttgaatcctcccattggttccaaagacaggggggtataatgtgcgagatgaaatggccagccaactcgataatgaacccatcccgaaacccgacgccggggttatttctttttcgtgcgcttgtgcaggttcgtccagtttaagccgatgcttcgactttcttcaattcttccctggatgaggtgatggatgttagtgggtgcggtgaaagaggggaaggcgggagctttggcggggatgggggtgcgggcttcggtggtggttttggttcaaagatgaaagagactttgtggacaagaagcatagcataaagagtatacagagaatcgggaagtattgggaaaggcaaactcactggagctgctttgagaagtcctccgcggcatcatcgtcatcccagctctcttcccacaggtgctcgctaccgtcatttgctgtcgagccattggcctgctcggcttcttcttggggccagtctgtgtgtcgtagagttagcttcgttgctgcagggaagcgcttgagtgcttggtcgataccttcaacggggaaatcctcgaactcgtcgtcttcctccaagacttggggcttcgcttgtggtgcgggctgctctgtggcatcggccttctgggtagttgggtttgacattgtgggagatgtgatagacgggggagatcgaaaggtagataggtggagatgtggacgtggatgtggcagctttgaggtcggaggtcggaggtttgacttagtaagaccgcgataaggcgataacgatgatgtagctgggagagaacctcggaaaacagcacagcgttgttgatttaaatggaaaaaaagaaagaaatgaatgagtgactccgaagaagagaatagaagagaatattagaaatacaaaagagtattatgttatgaaatagagcaaaaaataaccgatcgatgtagaattcgccttctataagaaattgcccacacggagctaccggcgaaaagaatccatgggaagagcctcagcactggggacatgctatattacagcttccccctccccctcgaccttccttctccacctccccacctctttctgtgtcttttcccttttctctttgttattctcttgtatcagtgatgttctcgaccgttgagtttccgcacagttgacatattgacattcctcccgatccggcgctctctcttttcggcttgatcggattgtcctgactgagaccatcgtggattgtgtccccattgaaaatttcattcttcatactcactgccagcggttttcgtcatgttgcgtgtcgggtcctggttgtacggcaagaagccggcgcagtctgtggactcaaaggttgagttgaaagactgtgagtggcgatacactctaggaaagccatgatgattattatgttgcatactgaccgccctcttctgagctagtgcatgatgcgctgacaggtatgtcttatgggaaatgtgcgcccctttagataccgactaatgcgatgaaactagctgcaacgctgattctcaatgatgatgttgatggcgcagagagtggtctctccacgggaacttcatcctttcacaatgtgggtatcataaatacaagctatgacgtagcacataccttgaggaaaggcgctgactcctgatcgagtacatagctgggtaaaggcgtggtcgcgtttgtccgggcaacattagggttcgagcaggagattatgcgacaaggtccattgctctttctatcttctaaatccacattttctgacaatccgcagcatccgagcgcctctatgaagcagaaaccagcgcggccaacgatcaaacccggtcccagcaaaacgcccaagcacccaatgcttttcactccgatatctatgctgccggtaccgaatacgcgttgtgccaagcaatcgcccaattgatgagtgcagtggttggggtgctgaatgaaagcctgacagaaagtatcaaagcgttctaccgactgaggaaggcttatatcgcactcgatgcgatcatgaagatggaagagaagtttatggagcagagggatatacgcaaagttttacggcccactgcgagtgatctctcaagctcgagcgctgcatgcccagacacgaagtcggagtcgtccagtcttctatcgaaaaagagcgcgaaaatggctaacatcgagaaatccgagcttaattcctcaatgaattcactggcgatctcatccagggcggtatctccagatgtttcaactccttccacacttgcgaagcatatccaccaagaccccgactcggatatcttcaagaatgaaatcgatgtttttgtgcactctggttccaatttctgctttggtattcttcttctactgatctctatggttccaccggcgttcagcaaacttctttccattattggcttccacggtgacaagcaacgagggctgagaatgctctggcaagccagcaagttccacaaccttatcggtgccatggctgctttggcactgctggggtattacaatggctttgtccgctactgcgatattatgcccgacccaactcctggtggatccgacgttgagggatacccgcaggagaggctggctgcgttgctggcggagatgcggttccggttccccaacagtcaactttggctgctcgaagaatcgcggatgttaggcgcgaacaaaaagctggacagtgctctggaagtgttgtccacggacaagaagagcccgctcaagcaggtagaggggttgtgcgtgtttgagaagagcttgaacgcattgtttctccacagatataatgtctgtgctgaagcattcattgaggtataaatcttatctggagatttttgaaacatcaagctaatcctttcagtgcgtggaactcaatacgtggtctcgttcattgtattactacattgccggatcgtgtcatgttgtcctgtaccggcaatcactcgacgacccaaagcttgcagcggaacatgctaaaaaagccaccatgtacatgcggaaggcacccgaattcgcggggaaaaagcgatttatggcccgacaactgccgtttgatatctttgtgactcggaaaattgccaaatgggaggcgcgcgccaaagaatggaacgtatctctggtggatgcgattggagtggacccggttgaagaaatgatctttttctggaacggacacagtcgcatgaccaacgagcaactgcaggagtctttgacccggctggaatggtgcgaaagcgaaaagaacaagatgtggtctcgtgagggaagcgaagaaaaggcgatcctggagcttctccgggctgctgtttttcgatccctgtacagacacgaagaggcgaaaaagatccttttgacctgcgtcttgaaccacgagaagtctgtattcaagggccacctgaaggatgactgggtccacccagtggcgcatttcgaaatggccgccaacctctggatgcagcgtcctacataccaggccctgcatgggattacttcccccgaggcgtcggaggaagcgtccgcggaatctagggagacgaacatagagatcgagaggaagcaggtatccgagtgcaagggatacctcgacttcgctgctcgctgggagagctatgagctcgacgctcgtattggactcaaggttactgcggcgatggaagcaattaacaagtggcagagcattcatgcggaagtctaatggttattgtgtttgttcaatccttgggcagcgcattgttcatagctgcccaggataccttgtgtagcatacacacatagagtacgagtagatgttaggattagatttaacgaagttcattttacgtctctttttccatccttttctcctctttcaacatcagcacaatggcaacctcaccgtttaattcccccgatcaccgatctatgcaacgtcaatgcttgaatgtcattggccacaaggagctccactatgcgatagcactcggcactatggccaccgacgccgagtctctcatttccccgtccgcaaatgataagtctcggtgcttagatggtgatgccgagatttcatgaaagccgttgaactctccccaaagaacttcccgttagaattggagattagcaacctgacatattccgaacgagttctcggataacacggcttttgccatcggaggtccgaccaaaagtccccagagtcttgaagaaaacgaataaaacgctctgagatgtccgatatttctcagccttaccgttgtcatttctccgcttgacaactccgttatatccacttattatctccgagaattatttccccccgacttttctacggacttttccgagtctacttcatatatcttgtttcgcacattctccctctcttagctctagcgctggtcctgcgacacttcggtcaatgatccgtaataatggtcgaacggacagaacatgactgtcgcactagcgaatctagcgacgatatcgaaccgcatcgcagcgacgaggcagatggaatcggagcattggagaagcaaagtactgcggcatcgggttattcagcctttgaacaacagcgcggacagtcaatagtctcgcgcattcggagtctcgaggccggtcagacggcgaaattcactcatccactcagccataccaagacaggtcctgatgtcatcgtggatttcgaaggaccggatgatccttacagaccattgaactgggatttcaggaagaaggctatcacgacggtgctgtatggattaactactatgggtatgtcggggaaatgatgaattgtggggaatgacgctaatcgccgttatcaatctaggtgcgacgtgggcgagttcaatgtatgtccattttcttttcgtcctcacagtttatacattattaaactaacagtattagctactcaaccggccaggcacagatcagcgaggaattcggcatctcaaatgaggtcgctacactcggcacctcattgcttttgttcggcctgggattgggcccgctgatctgggcacctctgtctgagctatatgggcgcaaaacggcagttttaccgccatactttctcgcggccatcttttccttcgcgacagccaccgccaaagatgtgcagactattatgatcactagatttttcacggggttcttcggctcggcccctgttaccaacaccggcggtgtcctgagtgatatctggagccccgagcagcgtggagctgccattgtcggctatgccatggccgtggtcggtgggcctgttattgggcctattgcgggtggtgccatcgtccagagcaatctgggatggcgctggactgaatatgtgtgtcttccacgcttcgttgaagttgaaaccatatgctaatatctactagatcactggtatcatgatgctattcttcctaaccatggaccttctcttcgtcgacgagagctatccaccagttctattagtctacaaggcacaacgactccgcttcgaaaccggcaactgggcccttcatgcacgccacgaagaatgggacgtgaccctcaaagaaatatgcaacaagtacctggtccggcccttccaactcctcgcaaccccaatctgctttctcgtcgccctctacgcatcattcgtctacggcatcctctatctcagtctcgcagccttcccaatcgtcttccaggaaatccgcggctggaaccaagtcgtcggcgcccttcccttcctcgcctacctagtcggcattatgatgggcgggtgcatcaacctcgccaaccagaaattttacatcaagcgcttcaaagcgaacaacaaccgccccgtcccggaagctcgtctcccgcccatgatgctcggctctgtgctcttcgccggcggtatgttcgtcttcggttggacaagcgcaaaacacttccactggatttgcccgaacatcggtgcggtcatgatgggcttcggctttttcaccatcttccaggctgctcttaactacctcattgatacattccagaaatactccgctagcgcgatcgctgcgaacactttcctgcgctctatgttcgcgggctgtttcccgctctttacgcgcgctatgttccataatcttggcgttccttgggctgctagcgtgctaggcttcatttccgttgctctcattcccattccgtatctattctacaggtacgggaagcggatccgagcgcgcgggatatggtcgcgagattcggtttaatttttttgcgaattcattgtacatgtcttcctattaaatgggttatgcgcacatttgatcgcagcctagttggatacacacgcgcatgccttgcatttgatatttgataccctccgagcgcctccgagtttcagccatctcagattgacccctacaagcctattataccaggatgtggtctaaaagtcctacttcactactttttctacaggcataattttcaatagacaattttccgcgtattagagtataacaaagaagcagcaagcacaaaaataacaggttgaacaggaagaaaaatgtaaagagagaatatagtgagtaaaggcgattgaatgccgtatgtacccaatccagaagacaaaaagccaaagccacaagaatatggcgaagacaaccagaatataaaacatgcaacataaacactgagagaaagaaatagcaaaggaaagggtttttggtgtatcctttttttttttttttgtgattaacacctgtttttgcttttttttgtttttctccgcggattccagctcgatcatctgatatcaagctcgagtactgactgtgtttcgtccggtcagcttccgcgctatggtcatcgccttcgaccatgtcttcttcttttcgatgcgagcgacaggatcaggcaatgcagcaccggtagcaagaagctctgctgggatatcatcctggtgcttggcgttgtgcaaagccagaacggccatttggcccaagaaagaggggtgctcaataaggtcctctagacggaccttgagaccatcttgctcaagaagccaggtaagctgagccaggttgaagacgtcaccgcccagatcaaagaatgacgaatccagctggaaggcggattgctgggttagcttgtcatcagcgtctgggtcggaagccacggtggtgcggctgggcaggacctgatgccacgagcgagacagaatgtccgaatgcacaagcagctctgcgatggagcgcgacttgaggtgtgcgctgaggaagtgctcgtctgaggctcgggacaggtcatcgattgtctgcggtggtagagagcgcagcatgctcgcggatggcagcgaggctgtcgggttggcgacgagggattgcgcaatctcacaggccatgtcgagaaccttggatgcgaatgatggcatcacaggtcccttttcggagtagcccagagtgacatccaagcctcgttcaccggaggggcgtgacaccatggtgagatcagctaggttgtcattgacgccgacaccacccatacggtacttgttgttgtcaagctccatggttccttcgtagtcgacgttctggtggaagactgaggtagtgaagtatgtccagtcaggccagtcggtacattgcttgatgatctcacggaagcccagagactcgaaaggcatgttggagacttgctggtcctgaaggtagcggaagatatcgacagcggtccatttctcgtcgagcttcacgcgcaccgggatgacattgacacaagggccaacagtgctctcaatgccgggcactgtagcgttgcgaccgctgatagtcagaccaaaaacaacatcggactgagcagtcagcttagcaagagttagggcccaggcagcttgcatgacggttgcgatggtgacatttccgagagcgatgggcgaaatctcaatctttctgtgaatctcggtgaatgccccaacgttctggaacatactggtgccctttctgcggacgacctgggtcatttgagagcctttgagaagatcggaccagtggcgataatggtctggggtgattgttcctggcaacagtcgcaagtaaccagcaaagggagtcaccggaggcagcggcgtgccttcatatccgtgcttaatggcagccatgatcttcggcaagcatactccatcgtattgagtgtgagagaggcggaccaagatacgatgttggtcgctgcccttcttcttgacaacgtagaactgcacgtactgctcgccttcgcgcggtccgtattcgcgatctctctgttggagggtcatggtgaattcatcaagagcgcggtcggtctcgtaaacaaagatgctgggacggatcttgcgcagcacgacctggaagaattggtcatggaagcacacgaagactgtgcgcaggatatcaaaggccgcgacaaccttcaagcaactctcgcggaggcgtctcaggtccaatggaccattgccttccaaatagaagtagttaagcatccatcgggacttgaagagagttgccgttagagacatcgcctggaagtcggtgacaggaagtacgtccgcgatgccacccttgaaaacaccaatcttgggacatatgccgctctgcacagcggcatcgtcgatgcaggacggcctgagaatctctaggctctcggtagaggggctgagccctagtgtcgttggcgtgatattgagtaaatcactatcagcctccctggggccgccagacttgagatcggcattcagcatttgctgagtaacattcgcagctcgcactgttgctagcatgtcctcgaagacaggattgttgaagacatctgcaacagtaagaaccaggccctcttcacgagcggcgctgaccatcttcatggcggtgatgctgtcaccccccaacttgaagaagctgtcctggtgtctcaccacgttgggcgagagaccaagagctgtgctccaaagactccacaatttactttccacctcggccaaaatcccatcctcactggaacgggaagccaccgaacaaatacccgaatcatctgctccttgtatacctaactggtacggcgagtcggctataggatcagggtgaccaccatagcttgacaactcttccgagtgaatgggaggcaccgtcagctttccttctctcaacatccgactaataatctcatgaacacgatcatcaataattttctgaatagcactgctgtcaatcgcatctccggtcgactttgccttgtcagccagagtggtttgggagtgatcccaatccagtgactcgggctcagcctcggaagcgaatgtggactgcgacagagtcgcagcgggagattcaatgaagctagtgaacaccttggcgacggtgtcagccagagcctgggcctcctcgtcagacacaatatcgttccagtatctcaaaagaatgccctcctggcctcgggcaatctcaacattcacggtgaccgcatactgtattcagttagtagttgaacaaagcattgatagggcttatacttacttcgctcggatcatgtgcatgctgaagatcgaaggtcaatcccttctccttaggacccgcaacggagtgattctggattgacaaggtagtattgaagagcgactgtccttgccaaccaagctcatgttggatgctggccagagagcagctttggtggggaatgcagcggatataatcatcctgaacattcttggatacatccataagagtttgttggtcggagaactgaactcgacagcagagcatattaataaagattccaaccatgtcctggatgccattgacaggggcatcccgaccggcagaaaggtatccgaaacacacgtcatctgagccggtgaactgtcgcaggacgagcgcccaggcggacagagtcaagttggcaagtgtgacagagctgcgctcgcagaacttgagcagctcagggaatcgctcgaagttcatcatgacacccttgagttctctcttggcttcgaacacagccgacggcgcgaggtggcatgggtgaactccaccaaggtattgtttccagtgactaagtgcatcactctggctctgggttctgatgaacttgatgtagtcgctgaagcgaggtcctgaaccctcagcaatctttcgctcgtaggcaagagtcatgtcacggaggagtacatccaccgatccaccatcgataatggcatggttgatctccagcttgaggatcacacgtccggtgtttgttttgcaaacagtcatttggtgagaaagcttcgattggcgcattgcgtttctggcatgaagagagatagcagccaacttctcctctacctgcgagtcatgacattccacgcggaggatattatcggaaaggttcttgagcaccagttgatcgaaagatccaccagtgtagttgctgtcaacgaaaattgttcgcagcacaggatgacggtcgacgagggtttgccaggcgcgggcgactccttcggcatcaaccttgctagatttggcgtctttgatctcaaacacagtatggaacatgtaggcgttgggatcgcggagctgactgagcaagaggccctcctgcatgggagagcagggatatatgtcctcgacctcatccttgttccgaatgccggccttgcggaaggtgctggctgtgagcagctggaggccgtgatagttgatggggaggagggggtagtcgctgagagtaggctcgggggtagccgttttcagtgtgaggatatccttctcgagggtttgcttgcactggacaatccagcggcggattgagccctcatgctgcattttgtggttgtaggtgaaagcaacattgaggcggtctttgatcacaatagcagatacttcgaagagtgcaaaccgagcagtctcagggcccatatcacctgcgatagcaaagtctgagctgtcgaagacagtaccgtggtgatggaacaaggaatcggctcgctcaagttgctgcattttacccaggtaattgaaaaggatttccaatgggacagggaaatcagtaccctggccctgtagaagacttttcgcgaagtaaggacggccgttgtctgcgatcttacgcctggtgtctttgacacgcttgataatgtcgttgagggcaccttctagtgtcagctttttgtcggtaagatcaggtatggcaaacttacgagcttctgaatgcacttgcaaaggcgccatcgtggtaaaccagccaactgttcgcgaaagatcaatgtcggcttcccagggttctcttccatgtccttcattgtagatagtcggcaccttgcgatcggtgaaagtgcgaccgaaggaatgaatgatggcagacagcaagatgtcaacagtgtctgtgcggaagacactgtggcagccgtcaaggataaattgggtggtatcctcactcaacgtgaaggattccatcttgatatctccataaacattgggtaagtcttgcatgccccagtaaagcaagtccggcttctccggggtgaaaggcagagcaatcgacgcatcgtgcgtcttggctctctccgtctgcatggcacaccagctttggaaagacaatgccttctcgagtgaaagagatccagagacaacgagctcttcgagatcctggaggacgatgcgccatgagaccatatcaatgcagagatggtgagcgacgaggaataacacctggccaccagcgcgaaggttaaagaggtcggctgccaggatgggcccattgagaggatccagacaattttgactgtcagcaatcttcggaaccatcgctcgggtatcgcccacagagtgaacgcggaatcggaaagattcatcgacctcctgtgaggttgagttagaacatgttgaatgatgattttgtattgagcttaccgctgcagttttctgttgccaggtgccgtcgctagatgtgctgaagcgtgcgcggaacatggcatgctggccgataacagccttaatagcgcgcttgagcacctcgccctcacaacggcgagtgatgcgaacagtgatgctctggttgaaacgagcggctcccttgaaagagtctgagcactggaagtagagtctctggacgggcgaaagcgcaaatccttcaccagacttctcttcacgccgagagacaggtgccttagaactggcggtttgagcaagttccttcacagatctgctctgcaagatgtcgtggagtgtgagaacaagtccctgcttgcgggcgcgggaaatgacagccattccagtaatgctgtcaccgcctgtgaggaccggttagtatgttgactgtttcgagaggatgggatacttgcccaagctgacgaaagagcgatcgacattgaccttctgtgtggagatattcagaacctgagcgaatatttcgcggacgatgttgagagattcattcttctcttccttttcttgcggcttctcttcggtcttgccacgcttgatacgatcgtaatcggccataatacgctcgtaggaggcatcatcaatgtcctcaatccaagcggtgatcttcttccggtcgagctttccagaaactagcatgggaagcttcttgacgagagcccacgtctggggaaccatgtaaatggggagctggttctcaagattcttctgcacttcgaccagctcgttgtaggcatgacgctcaagctcatcctcatcaacaagctcgcaaggcttgtcggagattagcgaagtatcggctgcgacactgttcaacgacatgacagtaaccaggcgctgcttgagagggccattcttggcgagaacgacgacagcatgccgagtaagagcatcctcagaaaggcgatgttcaatctcacccagctccatccgttggccgtgcaacttgacctggtgatccttccggctgatgtactgaatggaaccatcagggttgtagtagcaaagatcgccagtcttgtagattcggcgaggacccgggactgtgggcgtgaagtccttggtccaggcagggtcagtggtgaatgcttctgcgtttttctcgggatttttgagatactccctagccaaaggagtgccttcgagtgcaagttcaccgactgcgcccaggggagtcagccgatcgtggttgtcgggatcaacaatccaggtaagagtgctgggaataccgtaaccgatacgcccgggatcacgattggtggccacggcattatcgaccacagcaaagacacacgtctcggtcggtccgtacccgttcatgaggtgaacagagttggcccacttggtgatgacttcattggacatcttctcaccaccacaaacgaggtgcttaagggaaggcactgaggatggctcgattatactggcaattgagggggtgaggaaagtccaagtgacattgagtcgacggattgcgccggcaacatcgttgagacggtcgtcctcgctgggcacacagatggtacctccgagcataagtattgcaagagtctccatgacagcagcatcgaaagtgagagaggcgaattggaatactctggaggtctcatccatgcgaacccacggcgcgaatgccatgatactgctgactacgttgcggtgctcgacaattattcccttggcgcgaccggtgctgccagaggtaaatagagcgtaagccatattggagggtttgacttcagcgcggcgacgggcagaagacttgagggcaccgtaggccttgatggtctccttgctgatggggataacagtcttcatcactcggctgtagcggtttgtatagttgggagtgcaaagtatcatgttggcaccaacgtctgcgaggatttcctcatgtcgcgaggtaggatgggacggatccaaaggcacgtacccaccaccagcaatgagaatactgatgagcgtgaccattgcccaagccgacttgtccaggcagactggaacaaatacctctgggccaactccgcgagagaccagatagttggcaaagccagatgcgagatcccagaattctctgtaggtgaggtcgccatcccaggcacacacagcctgggcgtttggggtctcgtcggccttctcacgaatgaaatcttggacggtccgttccacagtgagcgggacacgttggttccacgtaccgatttcaaccttgtcttcagggctaatgacctccaagtcgccgagcttgctcgtgctgttcttgggcaaggcaatcaattgctggagaacatgggcaaattgttcagtgatacgcttagtctgccatccattgatcacaagctcatcatgatgaacagtgaacgaaatatttgtcttggtaataccacattccacgacaagagggtgtgtgaagaaatcttcgcttgtttcacgtttctcgtcgatccacattttattatcaagctcaccgtcacctggttggattacaagcaggttcttgaaatcgcagcccgtggcagtgtctttgctgagctggcggacatgttgaagaccagagtgtaagtgtggaatcatctcggtagtagactggtggatcttctgcaagtattgcatagtcaacatggtattgtcaacctggacacgagtggggacggtggtcaggacaggaccagcaatttccgcaacaccgggaagatcgatatttctgcccgacaaagtctcgccgaagcagacatcaccagacgccgtgtgggtagcaacgacgattgcccatgcagcgcggaggagcacagggatcgtgaagtcaacgctattgcgagtgcgggaagccttgatgctgtggtgctgagtgttgccagcacgcattgcatcaggcactgcactcttgttatgagggaaaggactgctcgaaaggtcgctcaaataagacttccagaatttgtcagactcttccatatcctttttcaccaggtattcaatgaaaagactgtaaggagtgccagcgcgtttgttctgcgaggcaaagtagttctcctcaaccttgcggaataccaaaggaatactccagccgtcataaagggcatgatgaacagaccacacaaagtagctatcagaggagccacgagggtgcaccatggcgtaaccggtcagagatgctccattgtgctttggtagatgaaggatgtcgttggggaggtcgtcgaacgactctgcttcgacccaggagatagggccgtccttaaggacaacttgagcgaagttcatggcttcggtatggacaatgcgagtgcgaaggatatccaagtctgccacggtttgttgccaggcttgtttgaatttagcaacatcaatgccagcagcaagacggaacgagggctgagcaacataagcaccgtgttgcttgatagatagcgtcaaaaggccctcctgtacggcactgcatggataaatatcgctgatgaggtccttggacacttcgcagttatcagtcacttcatccatcaagttctcgaggtagactccagagggcagcaatgagaacgccttgacgttctctttcttaacctcagcggctccattagacacgacgcaggtcttggccatgtcgatcaagattggggagttgaagatgctcgagacggtaagtgcgataccgtctgcttgagcagcaccgaccaggttcatggcggacaaggaatcaccacccagaccgaaaaagctgtcatcggcggtgacagacccggcttcaagctcgaggatcttttccacaagtgccacaagcttgatctctaggccggtggccgaggaagcctcccttctgtcagaggtgttgaaggtaatgtaagacttcagagtatccttggacaacgtctgcaccatggcccgcagtcttcggcggtcaatcttcccggaggaggtgaagggcaagttgcggatggggaagaagagtcggggcatcatgctctgaggcagaagctcgggtagagagcccttcaacttctgaatggcatccatgttagacacagagataggcagtagcaggggatcggctccagaaaccgtggggacaaattgatcgctgctgccgccgttggagtccggatcatgcacggtgaagaacgcggcgagcccctttgcgatggtgcgttcctcgggaacaacaacatcaacagcgacctgagagtcctcgggtaggcagcgaagacattgctgttcgatctcctccagttcgatgcgctggccattgaatttgatctgagtgtctttgcgggagatgaaggctagactgccatcgctgttgtagcgaacaagatcaccagtccggtacatacgatcatttcgcttgaacacaccctggaagccggcatgacggttccaaacaggattctcgaagaaagaggccttcgtcttctcctcgttcgcaaggtatccacgggcaatgttgcttccttcgaggatcaactcgccaacagcaccaacggggagaagtcggttggaattgttcggatccacgatccagactctgcagtttgaggcctttccaatagatgtgggatcatcattgacacgcttgccattccaatcaaccttgacaccagctgtggcaacgacagtggcttcggagggaccataggcattgatgacgcaccggtctccccagcggtcgatatggttagcgggcatcttctcaccacctgtgatgatgaccttcaacgtgggaacgttcttcggctctaaggtattgacaatggcgggaggtgccgtgatgaaggtggcttccatacgacggatggcaccacccaagttgttcatgcgttcctcctcactgggaatacagacacaaccaccagtcatgagaaccatcatgatctccagaacgctgacatcaaacgtgtagttagaaaattgcaaagcgcgtgttgtaggggtcatgtgcagcgtatcgatcatcgcgatcgcggtggtgctaagggcagtatgctcgacaacagtcgccttcggctttccagttgtaccagaggtaaagatagcatatgcagcactgttaggggtagggcgagcaccaggcaaagccaaaggcgagtcgggaagttgggagattgaagtctggcagacggcaaacgatttcgcgcagagcttcgaaactttggtgtggacagaagatgagcacaagacaagatgagtaccaatttcgtcaatgagcatcttcagtcgagaatcggggtgggatgggtcaatcgagacgaaagctccacccgccttgagaacagccatctgggcaactacagcccaagcggacttttcgaagcacaacaccacgaaggcttcgggcttaaccccaagactggagagatggcgagccaagcgactggaaacaatttcaagctgcccataagtgaaattcttgtcccaagagcaaatggcttccgcacgagggtgaagcagcgcctgttgctgaatgagctcgtcggcgcacttctccaccctaggaggggatgcggcattccaatcgcggatttggcgaactgagcgctcagtgaatacattgatatctccgattgtgcggtcacggaggttgtgagcgatcaaatcatccaagacttggtcaaacatgtccatgacatggttgacctggaaggaggaaagggtttctgaggagtaattgaagtggatctcggcgtacgaatgcgagacttcagcttcaaccagaattttgtaagcagtggatgtgcttggctcacgggtacttcctttgggaagattggaagctatgcgataggaaagggaggtattgaagagggttgtatcatcgagcccaagctggtgtttgacggcgtctaacacagcgacgtttaatgcactgttctcggagtctgtctttgctttttgaagagtctcttgcagcttttgctcattctgcacgaggaagcgacaggtggcaactccctcatccgccagtttcgtgtccaaagctgaggcagaatacccaaagcacacgtcgtctgagccggtgtaccaacggagcacaacggcccaggtaaactggaaaagagtttccacaggaatgccaaacaatctgctgaaggcatgaatgttggctgtctgtttgctgagcgtgcgggtggagcggccattgtcgcttgtcgcatgggaaaggggcgggaaaacgcagggctcaacatcggcgagatactccttccagaaagcgacgttggccccggaaagacttgcatgtcgtgaatcccgattaccagccttggatccgttccaacgcttgatgtcgaaagcctcgaaagcattgatcgaaagcgcctgggtttcgattctgagggcctggcggtttagctttccagaaacggtgaaggggagggaggatatagggatgtaaaaactcggaaccttactaccaggaagactagtgctcagattggcgtgcaggctatatacggcctctttcagctcaggtgtcgtggactggaggacgcgatccccaaaagtgcctgttgtggtatccgaagaaaccacaaaagcgacgagggcattggtcttcacgttgtcacgttgcagcggaacgctctccacaacgcacttcctcttgttgcctaggaaggaatcaatgcgcgcctgagtctgaattagctcgctagccaaggcggatccattcttatcgttctttcggccgaggaaaacaagggagccatcagacttgtaccgaacaagatctccggtcttgaataagcgatgttcatcgccttctagttgtccacaaagccaggaagcgtcgttgaaaaagtcacagctctctacagactggtcgtcaaggtatccccgagcaacaacaggtccctcgagtaccaattctccaacactgccgattggaacaaggcaattgtggttcgaggaatcaaccacccacgaaacacaagaggtgctctttccaatcaggccagcctcgttgtcgtcctgggaacagaacacgtggaaggaggcagccgagctctcgcatgttccatacaaaacctgcagttggagatcatcggtctgccagtggtccaggacactctgaggaacgacttcaccgcccagggcaatcgatcgcagtcccggaacatccttgggagagaaaaagcttgcggctgttggggtgatgctagcaacattaacatggagggcattgatagaggtggccaagttggcggggtcaatatcagccgggatgcaaaggcaaccaccccacatgaaagtgccaaatgcctcaacaataaatgcatcggatgtgtgaggtgcaaattgcagggtcctggagacatcggcaatcgccatggtggtagcgaatgcctcggctcgagtcatgacagttgaatggtcaaggacgacactcttggccgaaccagcggttccagcagtcatagcgacgtacacgatgtcggatgattgtgccacggggttgagaacctcgtcggcgaggtattcgaggagagactcgcttacagggatgacgtacggtacagcatcctcgagaacctgggccttctccggggaagccagagcgacttgcacagcgttgtcgacaatccaattctcaacaagagccaaactctggggtgtatcaactggaatacagccaccaccggctttcatgattgccagtgtggagactatgttccacacagacttctcgaagcagatagggatcagggtgccaggaccaacaccgaatgtgacaaggtaggttgccaaacgagaggagaattgatccaacttcgagtaagttaagttgccatcccaagcggtgacagccaacgcatcggggagcttcttcgccatctcttgcacaacctgatgagcgcacttctcaaaaggcttgggagtcttgctgttccacgccatgatctgggtgcggttgtcgtcgctcaagctgtctagctggcggatttcaccgtcaatgttcgacacgacgttctcaaggcaacggagataggtattggccacattggcagcctgtgaatcagacaggttcgtggtccagtagttgaggtcaattcgagcagtggtatccatggcctcaatgttgatgaaaaccgggaactcggcgggatcatggattgagccaacctcaacacactcaatgtcactgctgacagcatccttggaactaggaagccggcggtaggagacaccggaattgaacaaattcgtgtcagacagcttcaaagcatgttggatatcaatgagcgaagtgtgtcggtaaggaagactttccatgtagtcgttctgtatttgatgcagtacatcactgagcttcgcgttatcaggaaccttcatgcggcaaactagaaggttgataactggtccaatgacccactggacgccctcagcagagacatcacgcagagatgccatgtagctgaaggagacatcttcggatccacagaaggcgcggagagtgaggccccacgcggcattgaagacatttgcgagagtgattccgcgcgtctcacaaacagtttggagttcactgagcgcgccgaagttgactggaatggaccgaagtgcctttggcgattgttggccgtcagtgagggcagggaagtggcacggcttggcttggtccaagtacgagcgccagtaattgatgctagcttcctttggtgcatcctggaggtactgaatatagtccttgaacaaaggctgagggctttcctcgagtctgccagcgtatgcgagctgcaggtgacggaggatgattgagatagagttaccgtccatcgcagcatggctaatctcaaggcgagcaaacaaccttccagcgggtgtctggcaaatagtgaagcgatacgctggttctggctcgctgtaatccttgggatcctccttgtcaaaggtggcaatcacatcatcttccgatgaagactgcaaaaagataggagtaacatcatatctcttcagtacgacttggcagaaggggtcccgaggagtgaggttctcaacgaagatggtgcggaacatcgcatgatgagaaacgacctgctgccatgcattgatcaagcgatcaaggtttggctcgctagatccggtggcccgaatttcaaaggtgtcgtggacagcgtagtaggagctatctcgcttgcgaccaaggaggataccctgctgcatgcgagaacaagggtagatatcttcaacaagatcaggggactcgatacccagagcaggcaacttctcattgagcaatttgtccaaggtaggatagctcaacgacaacatggggaacgagctgagagtcaatcgtggctcgagggtgggaagctgctcggagagacttataagcagcttctgacattcggaaacccattggtgaatacggtcctggtgttgcataaacctgttgaaggagaagttgaatcgaactttgccggccacgaccatcgcagagatctcaaacagaccaaagcggggagtatcagcaccaaagtctgcggcaccgcctccttgaccagcctctccggccatttgatcaacaagctggaagagaccatctgtcctctgtagatctcggtgttgtccgacgtagttgaacgacatctcgaaggggtgggggtgctccgactctcgatttccctcggctggcagaacgcggctggcgaaatctgcgcgaccattatccgagacacgacggcggagatctttcacctgcatgagggtatcaacggggttgtcggaattgtaggcagagacgaagattgggtgcagaatggtgaaccatccgacagtatgcgagatatcaatggatggatcccagacttctcgtccgtgaccctcattgtagatagttggaagagaacgatcggggaaggctcggccaaatgagtgaagcatagctgccaggaagagatcaatcggctcggtgccgagagctttgttacattccagcagaattgcattggtgtgggcagggtcgatctcgaacgaggcacaatccacattaccatatgtagtttgagtgtccttcagtccccagtagccaaagtcggttggagcgagagtgtcggttgcaactttgtgctcatcccggaggatcttgcagtgctcagtctgcagacggcaccaggtttggaaaggcaaggagctatcgctggtttccgtcttctcgggatttaggatgatgtcttccaaatcttccagaataattctccacgagacaatgtcgacaaccaagtggtgagctgtcattgatagaacattaggctggtccttcaccaagaaataatcgaccgcaagcaacggtccagagaagcagttgattgaggattggctgtcagcgacatgagtcttgacctcgtccatgctgccaagattgtgcatccgccatctgtaagatcccttgatatcgcgagtgatgtgttgattcgatgccgttgcgaatcctgtgtcagtaaatcgcgcacgcagcatcgagtggcgagacaccagagtttcgatagcctttcggagggttgtttcatcgacgggcttgttcaaacgagtgaggattccttggttgaagtgcccttgaccctccttgcgtacaccaaagtgaaggatctggataggcgacaggctgaatggttcatcgacagcttcctcgtaagtcgtcaggtgatcgattgtcttcgcgcgagttgcgaggtcccggattgatttgctccgaagaagctcttgtacggagagagaaaatcctcgcttcttgcagagaccgatacatgtcatagctgcgatcgaatcaccgccgagggcgaggaaactctgattcaagtcaagctggttctggggaatgttgaggacacggctatatacagcagctaaagcatcctctatgtcgttggcgggctgtgaagcctctgtgccgacgattgcaacagaggtattgttctgaagatcggggtcattctccatacctgcgacccaagtggaaatgcccttgcggtcgagtttccctgatggcagaagtgggagagcttcaacacacaaccaaaccgcagggaccatataagtggggaggcgacccgataggcgctctcgaattcctgggacaagctcagcctttttcgaggcggagacaagttgtagaggctccaaatccgaatcagactgttccgcaagcaatccggtggaagagacaactgcggccaaccgtcccttggagaaaccagtcttggggaaaaagacagagcaatgagtgacgttcaaatctttgctgagctgattctcaatttcgccgagctcgatgcgttgtccgtgaaccttgacctgcgtatctttgcgaccgatgtaattcagggcaccagattcggagttgtacctgacaagatcgcctgtcttgtagaatctacggttagagccactttcagggtccaatgtagtccaagcagggtcgtagatgaacgattcgttcgtcttttgtggattattcacgtagcaccgggccaggggtgggccctccagaagtagttctccggggcagcccacgggaaccagttcatcgtggttatcagggttcacaagccaagtccgcacaccaattggcaggccgatatctttacaatcggtgtcaggtgtaacattggaattgagcacggatgccacactggcctcggtaggtccataaccattgaccagtttgattttggaccaagtagccagctgggactgcgacattgcctctccggccaggaccaaactctccagtcctggaacattctcgatttcaataaagccgatgaatgacggggtgaagcaagcttgggtgactcgcatctcgttgatggtagtcacaatatcgttgaggcgagcttcctcgctcggaatgcacacacatgcgccatgaatgagcggcgtcaacgcttcggccaaactggcatcgaatgtgtgagcggcgaattggaggcatcgcgactcgcgataaatgagcaaaccgggtccatgcaccattgcgccggacaaaaacgcgcggtgctccaacagggttccctgcgagacataagtcagctactcctgcaggcaactatatttaaatattcacaaagggctaaccttgggttctcctgttgatccagaggtaaacagaacacaagccgcattttgacccgtgacaccggatgccagattgacattctcggcggggtcagacaggggatctagagtatcagcagaaaggggtattaaagtcttcgcaataggacgaagtttttcggcaagatgctgagagcacagcacaaccggcgcctgaaccgattggatgagagcttgtagtcgggaagttgggtgagtcgggtccaatggcacgaacgcgccgccggctttcatcacgccaagcattgccacgatgttccatttctgccatgtcccgtcagtatgcctgcaacgaaataaattctggaacattgatccatccatgaaacattccactcaccgatttatcgaaacacaaagccacgcggatttccggcccgactccctgcatgcgaagatggcatgcaagcttcgatgcttggtggtccaactcggcgaacgtcaaactgccatcccacgcacacacagcctcacgatcagggccgctcaacatttgatcgtggatagcctcatgaatgcagcgatcgtgaagctgcggcatggtggagttccaattgcgaatgcgttgccagtcgttttccgagaacaaattaagctggctaatagcggtgttctcggaggaaaggactttggcaagcaattgctcaaaaatgtttccaatactcttcatctgctccccggacatgtcacctttgtgccattcaaggaagatgctgatgtctccacgcagcaccttaacatgaagacggacttgacactgcgcattgttagagaattgcgtttctgtctgaacaaaatcaggttactggattaactaacctcgtccggaagagctgttgccaaaataggttttgaagaagaagcagtgtggtcatatgtgcgcagcatcaagatggtgttgaaagggagatatccctcggaagtgacgtccgagctgccatcgagctggcgattcgcactgtctgcgcgcaccttatctacaattgccgtaagagagtcgttgtcgttgatggatatgcgaattgtcgaaatattgacaccggtagaacgccgtacagatgatttgagagagcgcgagtcgccctcgagatgttggtaaccaaagcatatatcctcggaacggatatagtaatgcaacaagagagcccaggtggctcgtagcattgggtccagacggccttcgttcgatgcggttaataactgcgcatgctgagcagccgttggtctcgtcttcatcgagactgggcgtttaggcccgtcaatcgtcgacgcgaaccgcggaagataacacttggtggattgagccatgctgtctaatgactaggtattaccaggctgccttctatttcgttttgtgttttccggtcgataaagagagtgtgggcctaaggtacgaagaacgaatgacactattagttcgacagtggttaaagagcgccgcgaattcggacggtctcgccttattttaaagaaccaacaagttttttttttttctaaaaaaaagtattattttcctaccccatcgaaaatagctacgttcaccggccggagactgcatgggccacactctcaagaatccagtaataggcgctatattccttgcatggggtcgagatgaaagggagaaggatggagagagacaatacgtggagcaggcgtactttggcccccctgtggaaccgattcagactcttttctgctatgtattcttttttcttgttttcttttatttccaagcgaattgccatgtcgaatttcttatcttattttctattttgaactgccaatgtaacccttagaaaaggactagctcactcgacctaacaccaaaaggtcatcatgcaggggaaaggtccctacactatctgtctgtgtactctgtactccacagcaactgctctttcagagcccgcagtttccccgatctagagcccttgcggtctggaacgtgggaatatcgattcagagcaagccgtcaggggcgtaaggcttttcaactccgaatcatgctgaaattggatggcgttatcgtccacggggtgctctttattttttgcccttatccttacaaggttgcaatgctgacgttgctggcgttactggctacctgggcatatcaaaccgcttatagtaagctggtggtcatatacatgtgcccagctaggatgtagccgttaccttcacttcacaccgcggatgaaggctcttgcttctctgctgcattggcatcgccacagttacacgggcctcgtgaggcgtttataggtcacgatgtacaccgactggtgtgcacatggcactgaccccggactacttacttcaatctcacctctactttgtactttagaagctctggtgatgggtgcatggcatggaagtccgaaaactggggactgtatgtatcagcaaggtgtagcgagctaggacgggtcgaactagggatcaccgcgcagttcaggcacgaccgcatcgagtagcggaggtggcgactgggtccggtgatcgggcaaagttaatttcccggcacctgacatgatgtcttgatcttggaagccttggagaagctcaggggatgttcaggagtcaagaaaaacccaaggaaaagccggctgtgggtcgcgggtccgatacccgatctgaggtcatcaccctcttcgttgacgggtatccaactctctcagtctataaatcagaatatacgggggtagctatgacttgcatcggagggataccgttgggaacgacacactctaagaccttcttcggcatagccggcgattggatctcagaatgaaactttcaagagttacaatttacggaggaaatccatataactaatctaatgggtatatgggtacatgatgtgtaagacacaacagaccacgaatggtcgttcctgcaagggcctccaagggatacgggcgtatccgaacccggagactcgtcgacttggctgtatttttataacagttacatccacaatacattcaatagctcaatgctagacgagaatatgcgcataaactgaaagtgggacacaatatctcactcggtagctactccgtacggttcctccgatcatacccagttgcgtcaaaaacatgtcctcatggggtgcagtatgtagattgcttttttccttcctcgccttctcttctcttttcttgttgaaaactcttctcggatctgtcgctctcgtatgagcaggatctggaccgtacctttgtatgcccactattctcactagtcaagatatcagtcaagatttgaagaagctaagtggatatgagtggatgtacatcccacctatagggatatggcatttttccctcggagatccgcacgggaaagggccgatattggcaatacacaaatctgcactagttgacacttatgacaggctagcctagcgcccgcagttcggcgtcgattgtggactaagaacaatggaaccacctaacaggttgatctcattgttgatctttattgatcgtcagatagatcactttatcgggttctgcacgctttgagccccaacgtaagagggaaaaataaacgaaaattttccaagtgtccatggacatatgggagtacgaaatataccaaatgcattacagaaatgtctctccgtcagacagtctggaatcaactgcagacgtgagcacaattggcacaggtgtactccgtaaatcagtggggtccattatgcagagtatttgccacgcatcaaccacgcctcgaggacaagggggaaatgaaaatgaaaaccggcttaccctggtcaatcggctccatcggggacgattgttcgtcaggcactacagctgtaggtacatatcccgacttatgcacattggctcagtgagcgccacgcgaaccacatcacgtcttggaatatgcagcattcaggttgggcggtcgcaattgaaatccgtaatgccgatgacagcagaaaactccgaaggattcaatgtgggccacgccaaatggttgagtgaaaaggaacgattggcccggatgaaatgaatatgcgaatcctacggccactacggaggcactaggagcaaaatgtgacgccatggcggttggagttggagattggagattcaattttggagaattatgattgtgacggaacttgcagaaaccaattgtattatgcatcttatttcctatgtttttctccagatgtggaagattcaggcgatttacttcattcgccgtgtctaacttcaacttctgcggtgaagcagagttcgagaaatatatatctacgcactgagactgtaagcttggagagtgagaataagaataagaatagaaatagattacattaactagttatattaaattcaattaataataaacactgtttcaagccagatccggcagatctcccatcctacagatcttttttcgccctcacatgagcgggaagtgattccattgccctaactcgacacgcgcccagatgcccagacattcgccattgcaactcattggaggtcattgaggtcattggactcattggagtctaattattttctttctgcaaggtagcacgactccctcgtgtcgctcgggatttactcgaggtttccttgactccagggacggaaggatagcgatgccgtggatatcccccacatcctcaaggggggcgaacgagcctatccgcaatttgtcttgggaatcaggaccactattgatgacggaggtggggtcatgaaatcacagtccaatctcccaaggtcttatagtaaaacaaaaacaaaaaacaaagaaaaacaaaccaaaccaaaccaaaacagatgcagcaggatggatccatacacaccgaaccgagtctagatgagctcacaagtcattcagtaaaagtattgttgtaagatggttgcatcaagagctgtattcattcccgctttgatgcagccaaccagtagtagggtcaaaagggtagtctcggtgttttagttctcctagatgcaatgagctcctgcccatagggatgcggacctcgtctagccctaggtacctttattatgcagatctagtagtaaagctgactgttcttatgtcactttttgatccatccgatctagcccaaaaagccgcaagttccccgagctcatgcatgttcttttaaccatacactcttttgacttctgattccccgtgtcgctcgttactacgtctttcttttctttaaccatccttccgtcgctaggtggttcaggaacagtcatgacatcttccggcttttcagggccttcgtgccgcgatctagataatactttccgtattgatgctgggtcctgtcgcggaggattcgatttctctcttttatttgaggagactatcctcgagatattacctattctattaatgctaattattattcctggccgtctgtggattctcttgcaaaaacgaaacaaggttgtgggatcatggttggtgttcgtcaagcttgtaagttgactgtgttgatatactctgctttctgcagttcggatgcatcccccccccccggtctttgcaattgacaaactattggattcaggatactcttaactaataaacatatctaaacaggcggcttggttggcactgctgggtcttcaaattgcacaaacagccctatgggcccttccagcagccgacattaccaaagcatcggttgcagccaatgtgctcctcacagtcggcatattcgcgctcgtcctgctttcttatgcagagcacacgcattctgtgcgaccctccttcattttgaatacctacctgttctgcagtttgcttttcgatatcgctcgttctagaactctgtggcttcgcagtgtggacagcttcaatgacatccttgccattctcgctacagtagcggtcagtgtcaaagcggttctgttcgtgctggaggctgtggagaagaagcacattctcaaatcggaatacgccaattatcctccagaagcgactgcaagtttctataaccgtgctgtgttctggtggctgaacccactgttcaagctcggctacaccggtgtcctgcgtgtggaagatctcttttcattggataaagaactgagctctgagcgcctactgactcgatttgatgagaaatggagcaaaggtaaatagccatccacgccgatatgtgagtttctatgctaatatttctctagtgactactaagtcgccaaacactctccaatgggagtcattgaaggccgtcaaatggcccctgcttgcgggtatccctgccagagcttgcgtcgtcgctttcaacttctgtcagcctttgctcttggagagatcgatctctttcttcaattcacctgtcaaccagggtacccaaaacatcggatacggacttattggcgcctatatcatggtttatggtggactcgcaatttcaatgggccagtatcagcatctcacttatcgcggcattaccatggtccgtggtgttcttgtcacaatgctatacaagaaagccagctgcttgggccttggggagatcgaccccgccaactcgctcactttgatgagcgcagacgtcgagcgcatcacacagggatggcagaccatccacgagatctgggcgaactcggttgagatcgccttggctatctaccttctcaaagttcaacttggagtttcctgtgttgttcctgtttgcgtcgctgtgtttgctttgcttggatcgttggtcgggatgtccttcgtggttgcaggacaagctaagtggctggaagctattgagaagcgtattaatgctacttccgggatgcttggatcaatcaagggagtcaagatgcttggcttgcaagattccttcatgaagtttgttcatggtcttcgcatcagcgagttggatatctccaagaagttccgtacccttctggttataaacatgggttttgcctggttgacccggatttttgcccccgtcttcacctttggtgtttatgtcggtacctcaagccagcccttgagcgtctcccgagctttcacatctctgtctctgttctcgcttctggcagaccctctcttgaccttggtgatggcacttatgtctttcgccggtgccgttggctctttccagcgtattcaacagttcttggacaaagaggaccacgtcgatcgcaggaataactcgcagactttgttcctcgatgatctcactgaaaagcgtgtgctgtcgaaggctaaggaccttgaactttcttccatcaactctgactctctcgagtcgctcaagcgctccagtgccccgccttctggaaacgccgtcgttgtccagagtggaagctttggatgggaagcggataaggatccaattctcaaggacattaccataaccatccctcaagccagcttcacggttctcattggaccatcaggatgcggcaagtctactttgctcaaagctttcctcggagaaatcccctgttccgaagggaaggttgcactcgccttccccagcgttgcttactgtgatcaaacgccgtggcacatgaatggcaccatcaaagaaagcattgttgcgatgtccgactatgatcctcaatggtatgcgtccgtgattcgggcttgcgctctggaagaagacctctcacagttccctcgtggggactctgctgttatcggaagcaaaggtattgccctcagtggaggtcaaagccaacgtattgcacttgcacgagcagtctacgcccggagaaagattatgatcctcgacgatgccctcagtggtctggacgctaccacggaaaatcacatattccacaaccttttcgggtcgggaggacttctgaaagagattggaactacagttatcgttgcctcatcttccgtcaagcgccttccctacgccgatcacatcattgtcttggaggaaggtggtcgggtttctgaacagggaagcttcgctgctctgaacaagactggtggatatgtgtcaagcttcggactcgggctgcctgattgggagtacaaggctaagcgattttccgacactcccagttacgacagcatggacagtatccaaaaagaaaaggaggcattgatcgaagagcctgagcaccatgataggggtggcgatctcggaatctacacatactacatcgacgccatcggatggctccctgcgactgtcttcatggtcgcaatggccggttttgtgttctgcatttcattccctagcatctgggtaaaatggtgggctcagtccgacactgcacaccataagcaagagatcggccattacgtgggtatctatgtaatgcttggctgcatcgccatgatctcactactcgtcggctgctggcaaatgatcatcactatggtcccaaagtctggcgagagcttccaccgcaagctgctgaccactgtcctcgccgccccgatgttgttcttctcgagtaccgacagcgggtcaatccttaacaggttcagtcaagacttacaacttatcgatatggagcttcctgtcgctgcgatcaatactgttgctacgttcttcctttgcctggcacagatggctcttattggagtctcctccaaatacgcagccatctccttcccgatcgtgcttggtatcttgttcttcattcagaaggtgtacctgcgcacctcgcgccagcttcgttacttggatatcgaggccaaggctccgctgtactcgcacttcaccgactgtcttcaaggacttgtgactctacgtgccttcggatgggaacatgacatggagaagaagaatatcgctctcctggatcactcccaaaagcccttttacttcatgttcgctattcagcgctggctcactctgtcgctggacatggttgtggcgggaattgctgttcttctgatcgtgctggtcgtcgctctgcgtggatcaactcttagtgccggctacgttggtgtcgcgctgctgaacgttatccagttcagtcagagcatcaagcttctggttaccttctggaccaacttggagacgcatatcggttccatccagcgtatcaaagactttacgtcaaccgtcgagtcggaagacaggcctggtgaagaccaggatgtgccccctaactggccctcgaagggtgcagtcgccttccactctgtctctgcggcttacagaccctccgaaccagttctcaacgatgtttctcttactatccaggccggcgagaaagtcggcatttgcggacgcactggaaggtaagaaacaatctctaattcaatatcctaattcttgctaacaaaacaacagtggaaaaacctccatgatcatgagcatcttccgcatgatggaattaaccagcggcactatcaccatcgatggagttgacatcagtcgactcccccgacgagcgatccggtcactgatcaacggcgtctcacaagattcccttctcttccaaggcagcgtccgattgaacgccgatccgaccggcgaccacaccgaccgagagatcttggcagccctcaagagcgtccagctcctccctgcgatccaagaaaaggggactcttgacacagacattgacgagatccacctgtctcacggccaaaagcagctcttctgccttgcccgcgccctccttcgcccaggcaacatcctcattttggatgaagccactagcaagtaagtcactcccctcacttcaagccacgtctccacttgacaaatatcgtttcaaatcccctgcatgagattccatccgggcgcgattaatttccttcgcgttttgtgatccgtgcgattcagccacacaccgatagaaccaccccttgctgcaagaaccaagactaacccactttctgcaacagcatcgacaccaaaacagatgaaattatgcagcgtgttattagagagaaattctgcaaccacaccatcatcgcggtcgcccacaagcttgacacaatcctcgacttcgatcgcatcgtcgtcttggaggctggtcgcatcattgagaacggggaaccgcatatgctgctggccgacgccaagtcgcacttcagcaacctctatatgagtgtcatggcgaccgaggaatcagattaattcctcttttggtttttggtttttgattttcggtttttaaaaattgggttaggttgtttgattgatttggcacctatacaggttgacgcgtcttctttcttctggcgtgacaatcttccacattccctttttcgaggtacatatcgacgacaacatattgatcttttggacattttcggagttatatattggttttcttgctggaccatgttcttgttacttttttgttctgctatgattattatttactctctttcattaccttataaccatggagtgatacttacacataactcccttattggacacttgattcttgatcttaataatctctaatattaattcaataccaattatggctttggctccttatcatatttcttatccagtaaatcaaaagcattattgcattagttttcttcatctgtgatattctatgtctatggtcgacgagcgggactttacagctcgacatacttcttcagtatgatccaagaagaatagacatacatatagtaaaactgggtatactgtcgtttatttcctttcccttcctatctgtagaaatattggacttgaccattttaaagttgcttgatatatatatcgcaggacttccatccatttccaaggggtacccaattgcgccaggaaacattgcactgaatcacatttgctaatgcagtcatgtatatctgcttttcaggttatgagcgcattgctcatttaactgtatttcatcaacgcctcgagtcctccactggatctccccggacttccattgctgtcacattcgcgccccaccaagatctaccaatcgcagagctttacctgccctctgcgaagtccaagtccatctacatccatactccgtactctcaccatccatcgctttatcaaatggagccccctataaatcttgaagaggtgcttgttgtgaccctccacacaccatttgggtgattcaccctgtttgcatcatcgaagcacattttcccgttaaatgaagctactatcagtatgtttgaaaacccaccaagtctactctttgcatataccgattaattcatgttagacaagagatttcaactcaaggcaccgcatgcccggagtcatcggagtcgctaataatccaaatgctaccctctaacctccgcccaactgtttttatatgttcgagaacgaggtcgaacgcccacaactggaggatttccgactcgccggatcacggaaccgactcccgacaccatcgataatagcaagtacgatcttttacgccccggagttatgtatgtcaagctctggaacacgttctaccaccgactatcaatatctcactactacacctctggagtacttgttggagactctaactccggcgagcgatatcgcgatcgtgagatcgcataacaatgtagccttggaaaaagatctaccttactccgtacaagatttcgtctccatcgataaacttacagattgccccttttccggctactgtggtacatatgtacatgtgggcctcgtggccggatgcgcgttcctagcgatgatcctggtcaccgtgaatgggtcaaaacttgctggtgctaaatgggtcagaggagatccactgataatccccgagatggtatttgcggatccgcgatctgcaatgaggatggaaatgtcttccgatatgcaccgacatcagatcaattcctaaattggcgtctcttcgctagacctgagtgtctcattgggcgcggttttaacgttgcagaatagtttaactttcgctttgctgtcatttggctaaatgcacttacctgcatatatgtactcgtagacctacggagtaattacattctatctatgaagagttgtataaatatgctcattatgtctcagtcagtatatccgtactccgtactccgtaccttggtcagattcggaatccacctgcccaagaaggcgatgattggcctatcctaattaggtatcctcatccctggtggatacaaggacaccccttctattgtcggtgcaccagccgtggctgttgatgggacctgttttcttcctgcccaggtgtgcgccttctccacctttcgttacccaagaatcctggaatattccattcatgggaactgtcgatcaccatttcttccctcgtgggacttctaatgcccatcaaaactactccgtacggaggaatataatacagtgacgcagcaaaagttttaagcacccattctactactacgtaccgccttcctaataaaacataccgccttctgaatttgtaataccgctcgttcccctcattatttgaccggcagaattgggtgctgagaattttgctttgacactgtacagagtagccttggtagccattatggtggagccaaacatgtcctcttatagtggtatttgaaagaaaagcaaatcctattttgcaccccatccgattatggactaccctaatagcaaagaaataaaaacacccatgtaccatacattgaaacaaaagaagaatcaaattcgacggccatggcaatccccaaggccaaaatgcaaagggtcatagataagtgccctgcgaaggtaccaattatagaaccatcgtttcatcattatccacatctttctcttcatcaagaccaaattcccagtctccacgctcaattcggctgacacggtcgagctcagactggaattcgcgacgcaggtgctcaagtgtcacgattatacgacgtttaagcaagtggttggttgcagggacttcgaaggacccaatgctgttacgccgttcgatggtggaagttttgctgcttcctgtgcggtggtcgggtgcaaaagcgacggctgtggatgttaggcgattgcgtccgagtggtgtaggggaggcggggtctacgtcctccatggagacgttcccttcttcatcgacttgtgttcctaagtgtctttcgtgaggaggaatcggggccgcgctgattggaggtccgttctcgacgaggatataagcttcgcttttgtcgacacaagcgaggaggttgattagagacaacagctcatggcggatttccttgctttcagcatcgtcttcctcaactggcgaccgggctgcatcctccgcttccctgcttttaagaatgagggctgatgacggagcatctcgtgctttgcggaggcgctggacgttgcggtaggcgatttcagcggctccgcggtagtcactgcgggcaatgcgataggcctggagaattcgggtgtagtcgggggtagctgggaaatttttgctgtccgcatccagccaggatacattggtggtttgtttgcgggtcaggtgaacgaggatctcgtcaatgaaagatgcgatgttgggcacgagcgaggtggggaaacggagaatctgcttaagaccagcagtgccaggtccagagactgccaggatggtggagatgagttcggtaagttcggttctttgtaatttgagatcctgcaacctagccagagcggaatatgcctggtcaaactggcaagtcttaagggctccagtaaacagacgagacagcagatcgtcgcgtacggtcgggtattcagagtcttgctcggcccagatttcagagtcgagggcctgcagcgccaggctggcaaagtccgcgacatgagagtaggagcgcactttttcataaatggagaggatgtgctggtaatatttcgcaagaccgttgtggaagcagtcaacatcgaggaggtctaaaagctctgctgacatgtcggaaagattgcccatcggcttgccgcaagctgcatttaggttagctgagttatatcaacatgagaaatcaccaggagatacgtacagagtagataggctgccttccggaaatatattgctgccgtatcgaattccgacatggccacatgcaatcgacccttgacatacgttgaccaggcagtacttccctggaaacgaaggaagtcccatgcaagatcgatgttgttcttggcgatcaggtcacactggatgtgagcgactgcgcttggatagttcacttcgccttcgcgggtaatccaggccacgacatctctgattcccaaagtcaatgtatagctttgtggagagtcaatcgcttgctggggcttgatatcggtaacaaacagatcctccaggatgctcgtagttcgttcactgttagtcttcgagctgtctttcagtgaaaatctctgtgttgaatcgacgtggggcttgcttgccctgtcgggacattggcggacattagagctgagccaggacatcatctcatattcacgtaggagatcaacaagcattgagaaaaggtcggacgcatcgaagttggacttgcttgtttgctcccattcgccatccacgaacgtgacgaggattagtagatcaaaaaagatttgacgagatatagagattgtctcctgcgcaccactgacgagaactcgagcgccaaaccatgttgaagagagttccgagtcttctccacagaagtgaagggaggcggtatggataatggcaaggaacgcctccatggacaagcaatcggtcctcatgtattcactaagggctgcatccagagtgtcaaaggctttgttggaaatttgattggcaaagtcacagcgctctcggaagttctccatgcggtccatgatcgacgaagaaggctcagaaaagatctcggcctggagagcggctcggcacgccccgtcaagctctggggagaatcttttgcggaaatcggatgccaccttcaacaatccagaggctgtttcgaaattcgggcccagctctctggaaacattgcgatgcctccagcgatctaccatcttcggcactccatcactgagctcggagctggaattgtgcaagaacaattcagtgatgctgcattcccgcactacagcgcaagagtctgacaggaggagccacggcatatcggtgtatgagtcgtacgcgagagaaattggttcgaaccgccgcttgttaaggtcttccgcaacttgccagaactgacgccactttgaatctgtatctgaaagataccgggggtagtccatctcatcgtccgcaaatttccgaagggagactgccgctgctattgtggagcagagtcgttcctctaaaggcagactctttttcagccctccagatgaagtcgacgagagtggcttgagagcctcctgataaacagccagagcggtctcaaggacttcaggcagatacctattcggttgcaggagatactgtagccacttctccgttggatccaccacatcatccacgaccagaggtggtggcaattcttgtcgatgggtttcgaatgttgtcgaaacccagttagaggcccagtccgcgactagggtttggaggttgaaatggagggtgtagagttggtaaagaccgtggtttctccagagcacccacagctccattcccttgccttcttcccgggatttgacctggaaatcagcgatgctccagaacatgttccctgtggcatccggatccacaggtcggaaaatatcgtctgcgaagagttcctcaatgatcagttcggatgtcagcccacccttgacagcccagaacttgaactttccgtcctcaaatggcgaatatgtgacgacatagaagcgatgtccaccatgcatagctcgctcggcgttgaagacgcgcatgaatgatgtctcggcggggttcagcgtgtacggtgcaagatctggatcatgaagcgagcgtcccaggagatcttttgtggccgccagcttgttcgttgctagattccaaatcttaagagtgtgattcagacagatcgcgaagacgtatgtctcgtcggaggtagtggcaatggcatttgcgacatgcaaatcgaggttgcgtccgtcgtgtttgatcgaggagggtgcattccatttgacgaggcctcgaatcgaagagccccatgttcgttcgtcgaaagtgagaggagaccaataggaacctagtttgagagacagtcaattaaacaggtgttgtaaaggtaacaagaacgagaagaaccactcaccatcgtcgccagctctccgggtcagccgtagaagcgcgccgttatcgagagagatgaacaactctaggggactgctcgcgtgtagtcggtgggggttcgaaaaggccaacggagcggggaggaacgtcttgcaccaatccctcacattttcatcgattgaagaggtccgtcggaaaaattcagggcgtagagacagggtgtgaaggtgcttagaagcggtgatcacaaagacactgatgagttcgtgatcctcggagtcggacatttcaactccgaaggggagaatctcctcctggaaatccagtcgcagggtcacattgtattcgtaaacctccattccacctttagtcaggtccgcgcactgaatctccagcactttgttgtcgttgatgacccgccacaagaatgtcctcggatagaccctgcgcttccgaaagtagacctcaccctgtgtcgcgaggtgacgtctggcaaattcatcttcatctttggcgattgggagttcctggtcggtggatgagatcgaaaagcgtggacgacggatcgcgacctcttgagtcggaatctggatgttggcgaccgtggtcggcgagtagggccgaaggtcgacccttgagtctttgtaaattttcgccatgatcgaattgacgtgtgtcaacttagcactccatggccggggaagtaaaggttggaagatcgaagggcgggaagctggagctctcaaaaaacatgggaagtcttggcgcgataaaaggcctgagattgatggcttccgccctttgaggtttactcagaccacttacactctattttactctatgttatcttctaggtgaattgcctctcttcaaaagttaagaataaacagaaattgtgatttctaattgctatcaaaaaaaaagatcccccaacgctgagatgagatgccacgggtcgctctaaccacataaacagctattgaatataagctcatcaagtcaataatatcgtgtcgcagaacaagacaggcacaaccttgagaaatgtcgactcatttatcttccaagtccttctcactaggatcaccgataccattatcattgatagcgaaaaggcaatcactctctggaagacaaggactatcataaatcttgcaaattcgagtctcgccacggcccttcttcagactgagtcgagtggtactggcgtgggcgatgatattaccaccaataggtttcttgggatccgggttaaacatagcactggggccaccatcgacttgggcaacgacctggtttgtgatcacgactgcaatgccaaattcatctgcaaggcgttgcaaggtacgcatgaacttagccaaatgactctgccgtgaggcgagctcaccacgaccgttaaaatccgttcggtacagagatgtcgcggagtcaaccaccagaagagagaatcgcgtctcgcacatcatctgtgaggcctggttgagcaacgagagctggtggtctgagttgtatgctcgtgcatatgccacattatcaaggacctcgtcaccgacgagaccgtatcgctctgcaaccgcaaggcatcgcactggacggaaagtaccctctgtatcgatataaagacacttgccctcgccgccacccatatcaaatggaagttggcaggtcaccgcgagagtgtgacaaatctgactctttcccgttctgaactccccgaaaatctcagtgatcgaccccgtttcaaacccacctccgagcaatgtgtcgagtctcttggatcctgttgtgatagagatgagctcgctcctccgggcatgcatttcagttgccgtggtgaatcccatagggaccagtttcgaggctaatcagcgcgtttcaattagcgaacccatcttcaatgtagaacttatctgtcgcagaagaggggtttaccttctactaggatcttagtggccttttgttccgagatacccttaatctgttccaacaaccgtttgggcctaaaagtcacagtagtgttaaccaaattgagatgagcagggcaatcggtatagcagagctgccgccggggggaaaaagccgcaagaatgaagatcatggatactcacgtgtaggcgatggactcaacagtgttatatcctgcatccaggaacaacttaatatccctagcggtcaagcccgaaacaccctatcagaaccaatttaatttagtataaaggtccaacattcttcggcgaaagaatatcgccgtgggattcactcacgtcgagcgcggaaagcggagtgggggctccagggccaggaagtccactatcctcgagttgctcttctccctccatagtagcagtagtactcgtttctcggtgttatgaggatcttgatgccttttggcggggtcactcgattcgaaagcacaggtgatgacgcgtttggggtttgggtgagatgagtactcgctcttctcgattttgaatattaaacaaagccacgggttttaaatgatcaattagcaagcagaaaatctctgtaaagtctgaaaggtctaaagcgtctgtttgtggcaaaaaatctccggatgactctgagaaacaaatcggacgcgtcaaatggatcgcgagatcacgtgcagtgctgccttgagcctttccggtttggcataacgaactatatctcttccaatttatgaatacaacatatgtgtgaagcgcatgtattactttgtttctctagtactaccttacgattaaattaccagcaatggttttcattggggcggatcaattactgtattcccagtgggtcggatgctaatggttcaatattcaataacaaaaggtgtaagaatacaaatcctgcaatggcctgcatgctaagacgccgtctgtccattgaatgatattcactcaatgttctttgagtcatggaaacccaagtgctgaaaaactgcccatgaactgccgcaacgccatatcaaaatcaatgctaaatgtccgagcaaaagcaggtgttgaaggtcttcgaggtgtttgttgcattcgttttccttgcgagacaatgattttttcgtgtactgtatctccctactgttgattctcaggagaattgagccacggacggaaaggacgaagcaacgacttccggaaccgtctctgatactgacgcagagccggattaaactccagctgctcggctggcagtccgatttggatattttcgttgaagatctggcttatcctgcgtcggaactcttctgatgatcgccggcgaagacggtctatgaatgaggcgcattagtttctgtgttcaattcctaaatcgtggcaaattaaacttactcatggttcgtgagccccgcttgctctctggtgaaggaccagatggtgactcaccgatggctgggacatatttcatgccgtcatcaacgccgtccaatcctactcgataatccttcgtgtcgggattagaggttgtaccgaatattcgcgtgtgaaagctagcacgcttttccctaactgttgtgtccttcatgccgatcattgactcctctcgcgcaggtgacatgcgcatggaatctaggttgagcagactagatcggccataaagtgcgctgggtctttggttctcgtaggtgaagcctgcggaggctgggttgagctcgggaacgacttcacgtcgggcagccagtggcatgggctttgggttgatcaaggaactgtgagattccaccgaggagctgggggtgtcaatggttctatacagcgaccttggcactggactggccggtcgacttggaactggactttgcgtgggtgtgttgggatctgagacccagatcccttccactcctattcctctttccaaagctctggcaccgaaagggatgtcatccttgtgcagcattgggtacacctcagcttcctcctctcgttcttttgcctctgtcgcagtgtgtttgctcatcgtccagcgattccagccgaggacgcaaaaggcgtaaaggagcactaggatctgcgaagcttgtcagttggcgtctttgtggcattatcatggagtcacgtacgatcagcgtagctagtacctgtcaacgacaatggtcagcaggggacctccgtggtcatgagtgtatacttatacttaccacagtcagcttctcccatagctcccaatctacccagaacgtcatagtggccggttactttgaactgtattcgggctttaccgtgaagaacatccgagtaagaatgtgcagactttcttttggggcacagatgaaagagatttacggataaaaagatactggagagggattccgaggtcttaggttcgagcaaaggtgatctctttccgggaacagggaaagggcagtggtggcaggagcgcctgcttaaagcatgtccgtatagttctgggttttctttcctttttgttttttccttttcatattcatggtctctagtacgtaggccataagcatgcgggcatttatgatttacatacttcattgactgtggatacacagtgtccagttttgaattgcagctatgaacagctactgagacggccattcaagagagggacaaaaaaattagctcctaatgttgattgccatataaaaaaaagaaaatacagaaaaaaaaaaaagaaatctctccctcggggaatcgaaccccggtctcccgcgcttatcggttttaatgacaagcggaaatcatcaccactagaccaaggaagaatgcgatggccgagttactgctcggccacttggctggttgatagggaggttagccatctttgttattataagccagacttttaccgaacatcttcaatccacaacatatgcaaaaggtacacacgtacgacatcttggtcgctaaactctcaaattaactacaaaaaatattgaagagtctgccttcttgatcttataaatgagaaataacaaaaagtcttcattggtcatacgaggacattatgaaagctacttttcgcctttatttcctcattcttttcaaggtttcttggctcttctctacttctagttattataaccttgtgttggcactagatgtgtcaggaagagtgaaattaattgactcagacgcacttgattatatatctctctctcaaaactcagttaaccaccaaaacagaaaaagtcactaaatgctacctgatatgtactcgaaacacttcaacgagccccaggcttggcgtttcctgggagacaagtatccagtcttgtcatcctgacagcccttaaaagccgcataggtctctcctatccagtcctcatccacacatttcgaacccgaatacatataacacttgccacgtgtgagatacaatgacttaggctttgtcactttactggaagcacaggtgccccagttgagaccaccgttagtccaccatcgacaggacgtggttgtattcgatattgtggtgtcggtattgtcagcgagaatgatacaattctcagtatcttgagtttcgtgtccttgaagagagaagtaatcgcctgtacaaccagcaccttcgtatattgtcatttgccaagtcgcagacggagcgacactgctcgtggtttttgttaccacttctatgctagtcatggttaccatgttcaccttctcagtagtagtctttgaagtagtcgatttggaagtagtggtagatttggaagtagtggtagatttggaagtagtggtcgatttggaagtagtggtagatttagaagtagtgggcttggtagtggttttcgtagtagaagtctttaaagtagtcgccttcgaagtagcacttttggttgtgacttccttttgggtactcttcggtccacaattgaacaagcaaccgctgctagcatcgcaataatccgagctagtgccacactgaccaaacttagaacactggagatataattagtagagtcagcaagatgggcaattccgacaataaacccacacattgattcgaagagcactggtttagagaggcgagatcggcatagttggcagggcgtcttgtcccgggaacctgaggaccgcagacagcatgcgggagagcaaccggcataggaagggcaccggagctgagacaaacaaaactgccttgcttcacattgccacaacctgtccagtcccaggctccgacattccaagtttcgatattgctggtagtgagctggtagcgcttagcaagagctgcgcaggtatcaccctgctgaatggtataggtatagcagataccatcgctgccaggcgcaaatgaactgcgtttattgagtgaatggccatgagagtcgccagagccatgcccggattgggcagttgctatgtggacagacacaagagagaggaggatatgaatgaaatacatcactttgaagatacccttgaacgtatttctggaaggatcaatcagtcctttataaacagttgaatatgagaaaaataattcttcgagattagctagtctgatcaaggtgaccatcggatatcgaggtcagttcattgttcaactgcagaccccaggaaccatacaaggttctgcctatcgcatcgagtgatgggtgagtttaaacaattaattaacaaagaagttgccacaacccacgtattaacctcttcggcttaccctttctttccctacacacgatatccgagggctaggatcaatacatgatttccaagcaaacacaatacggggaagcttacacatacaaggccaaatgcatcagaatacaggcatagcaagagcggataacaggaaaaaaacaacgtaagacttggccaaaaaagaaaaaggaaattagaaaaccctagatcctggagagatctgaaagaaaaccgagaggaaacggagggaaagttggcaacaaagaggctatttagcaataaatagcattggtggtgcccatgtatctggcagactattgagacttcatcccaaaacagtgctcaatagtgctaatggagtcacatcctgacaccagaggcaaaaaacctctttcaagttccgagtcatgcgagagtccacggggagacttccttttgtgtcatatttatccaggtagagttgaataacagtttccttggaccgacaaccttctcaatagctacttcgcatgcttgatggttattggggtgagccaagagaagttgaaaggaaagcagccagagagagataaaagagaatactgatgacagttgccagtaggtaccggggacaagctggccataggacaaatgtgacatctatgctagcaagggtccaaagtggacgcatgaccttcattcggcaagtcgcggcaagtctatgcatttgataagacttaaaaatccaggctattaactcctcgggattggtgagaattatacttcaaagttcaagtactgtggcttgaagacccgggatttgagtcaattgtgccgcactcttctgatttattactaggaagaaggaattgcggcatcacggtccaatgacccgacgcttagatccggacattatcatcgaatgaggttagcgccgactagctcttctgcacgcagtccgaaatctgcacgcggggactccgatgcaggggtattgtctcttctcatccggcggggaattcactcggagaattatggctacgaggtcttctttctggtgtcttctttcaatatgccaccacacaaccaggcacacattatgactttacactgctagtatacataccatctaggtatggggatagtatccacattattcacaattcccgtttacccacccctcccgcatcctctcctgggcatcattgcttgttgaaagcttggcactcttatcactcacaggctaatggctagaaaacaagcctatatattagctttcaagccacagtcacattaagtggctgttacttactgacaattcctgccggtgcgctctgaagagagcgatcacttccatattagttcggctttctcattctacgatacttgttaatctttatcaacatctccagccgtcggacatccggagacccggagcgctggagattgtatccttttagcacactcgagaaatagacaatgccattggactcagaccctagtctttgctgagtatgtgtgtggatgcaatgcatgaaataggtccgagcaatcgaggcatctgggtacttgtgacccgagcttgcgagcagttgcgccgataaagtgatatcttcagaaaacggtccttcctgggtttatgcatcggtctccgacggcatcagaagagatgagggggtgttacattcagagagaagtgttcaatgtgcattagctcgagtacttcggcattattatcttctattcttccgtgaagctatctgtggacaactagccacgatggctatataaacgcgcatttcccatgggagttatctcgttattcacacagtcaagctacctccagttctttcaatcaaacagttcaatcatccaatctgcactatgaagttctcggctaccatcctcagcgcagcgttgctcacagcctcagctattgctgctcctctcaccgaacgccgcgcagctcgcaatgtcgccagagctgagggccgcgctaaccgaatcacccgtccgccttacaagcctgacaccagggagcttcttagtctgaacaagacaagccacgaggagtacagctccaactgggccggtgccgtgctcattggcaccggatatacctctgtcaccggacaattcaccgtccccacgcccaaactaccctcaggtgcttcctctaccacccagtactgtgcctctgcttgggtcggtattgacggtgatacttgcagcaccgccatcctccagaccggagttgatttctgcatccaaggaagcaaggttacctacgatgcctggtacgagtggtacccggattacgcctacgacttctccggcatcccgatctccgcgggagatgtgattaaggtcactgtgaccgctacctccaagacggccggttctgccgtgatcaacaacctgactactggcaaatctgttacccacactttcaccggtggtgttgatggaagcctgtgcgagtacaatgctgaatggatcgtcgaggactttgaaagcggcggctcgctggttcccttcagcaactttggaactgtgactttctcaaacgcccaggccaagtctggtagcacgactgtcggcccgtctggctctactctcattgatatcaagcaaagctcgcaagtcttgacctcctcttccgttactagcaacagtgttactgtgagctatgtttaaggtgaaggtcacgaatattggaaacgtaatagtgcactagtaggcgaaggagagtcgggaggttggggggccgcaaagaaaacagggtttggcaagcaatgggagatactgtgttatcatttgtggtaaatacattagaagccaatcgaaactcattttgccttgattgatacatagagtggggagttatttggcataatctagtggccattgtgtgcactcctcgaaaatcaatattgtagatacagtttagctataccgatgtcctccgaaatattataaaccaaatgaaggtggtgatcatctagatctcgtgtaaatatcgcaatcataccacgtctacatatttgacaatttcagcttaagcattcaggttgagcggcgagacacaagagaacgagttaagctgcgggagctggaaggcatcaaccattcctaggagagaaattagtatggagtaaataacaagaaagcataataactcaccaacaatagccgcccacatgcccagtccacacatcgagagtgatgctaagcagaacacaatatgccaaacgttggtggcgacttggaaggtgccgccagaaaagaaaccgcggacccatcttgccgttgttgattcggtccggatcacctctccggttgtcgggttgaatccttcaccaatctccggtcgaatagcattcttctggatgtcaaatgcaagggcaaacaagggaggtatggtaaatgtcaagttcaaaagcatggaagcggaaatgatgctgacgaagccaaagtaatctggaacggctgcggcaatgataaaggcgatcgtccaccaaattgggacgagagaagcatagacaattttgccaacccgggtattcagaggaggcataccgaaaatatccatcaagacgttattgtagacgatcttgactccaatatttccgtagaggcctgcgcagatcagagcagagagcaaagaaaccatgttgccgacggtttgccacgagtagacgctgataccctggtaactcggactgaagctgtactgtccttggagatgatagacgacgcatccgtgagtgagatagacgctgtagatgaaaaactgggctccccacatagctttgaggaagtctcgaggccgccgcatttcggccatgaattcgacaaacagctgtgcacctgcatatgccagcacaccggaaagcatgccattcaccgacccaatgagtccatccgtggggatattgttgtaatgcatgatcggcgggtagttaccctcactatccggtgtgatcgttgctctgtcaaccgcactgccagctgacccgagcgtggaaattttgtagttcggtggagacatcgacatcacacccatagtcatgaagatgacaaacaaattcatccacactgcgagatttgcaatccagccatacgctttgagagtcctgatctgagaaacaaagaagccgacacaagcaaagatgacgggacagacaacatagcagagtcggaactgtgatacttgagagatgttttcgccaaatccgatcgtgacttggcccacaagcaagagtagcgagatcgcctgagagacatttgtaagatggcgaccgtaccgaccaagcgtccggaatccgagatcaccatagttcttggccgggaactcgtagctgtccacgccgaggaagacacgccaaaggagatatccagagtatccggccatgaatccgaaaacggtgtagaaggcaatgcctatatcccaatcagtcaactcagtgttccagatgtgtacaggaataaatactaacctggtccccaacccaacgtgcccattgcaaagcccgcgccatacgggccgagaatatccgttgtgatcaaatagaaacctagcagtcttgtaagtatggagttcaaaagatacaattgccgacttacaggcaccccatgaggcagacctaagcgaacggcttgcatttgtccattcctcgtctgtgattgcaagtctccgctcgcgagttgaaaagtctttctctgtcagtgttgtaattggcccttcttcggtctttttgcctgagagaagctgtcggatattgagcaccggaggctccaaaagctcttcctcttctcttgtcttcttcgaatagtaatggtactcctcgaatgtgatatttggatcgtaagcgtcgcgagcctgtggtttgatgagggttgttgaagtcaactctccaggcgaagtcaactcccgaggcgattctggcatgaaaccgccctctttctcgtccaaagagagttccatattcatcgacagtgagtgtagaataggcttcaaatgagaatgtatagtgtgagacagatgcgaacattcattgtccaagtgggtaaagttgatcccttttaatgtcatataaaccaagcgcgggggataagcagataagcatctgtccaaagttaattaattaattccgaggtatacaagcattaattcggagtgttgtcggagagagagcccaagtctcctatcgcgggactgcgactaccagttggacgcattaatctaccgataaatccaaatgaatgcaacgataaaccagccattgataacggtctttgataatccttgcctgattgagggtcactctggagaaagggccattgagcgagagctaacggggaggaaagataagtttcgatggaacctcaggcccacaggtgagtgcttgattggtgtctggggtatccggagtgcagccctaattcctcagatctcatgatgggcactgctgtacggagtgcaggagggctagttacattcatagatgctaacctctccccttccccctcacattgagcgaatactcggttctccttgatagatgcttattgctggaatggtcaaacatgtaatgactaatacaaaatagtcacgggacagcgtagcacgggacgcacagtcacgtggatatcgggggaaaatacttccgtcccggtattaacaatgccaatcttatccaccaatacgcagtaaccggccagtatatttttacgggctatttttcacaccctatggtcgtatatatcagataatttgtgggatagaaacatctcgtagaaatacagattcaaatgatggcaagaagggtatgcgcaatgttataggcgacaaaatcaagatgtcctgatgcaatcagacacagaagagcccaaaaagaaaaaaagaaaaaaaaagcaagaaaaaaaatcaccagcatctggctaaagagactttccgtacttctcatacttctcatacaagtgcagtatcgctattctcctctgtatagaggcaatcggggaaattcgccctgtagcaattttagcgcgtgaatcactaattggtgaagtgttgacataccagaaatcaccatcgaatgcacaatagtcaggcaccatccagtcagcggtgggcatctcggcattgagctgtgtaggtgatgtttccattccaagtggatttaccggttgtaatagcatatccacaacagactggagagagcgcttggcctgggaaaacaatttgaaattaccgtcactggggctatgcaaaatatccatgtgtacaatcagaacagacagattctcgattacccgtcgtcgagacggcgggtctaattccttgaaccgacatcgagatgatggctgtagaagatatagtgcaagggccccggcggcagggagagcgcaggatgccacctatatataaagtcagcccaacataatttaacaagtttctcagggtacgtactctccaggctagagatataaagccaaggttcggtagctgttcccgtcggaccaaggcatcattaaccgaggaaattagttccattgcggagcgaaataaacttgagtgttcgagtccatgccgccatgctgcccattcgatcaaaaatgaagactgtagatataaaatccgagtcatatgtaagcactccatttccatgcgcggtctttggatatcccagagttcgtgagatggcaccctcagaaaggacggtaggttctcccatgccttgttgagttcatggtgcaagtcactgtgaacgatcagctaatgtgttgcacgaactgagacgagtcacgtacattattcgccgttgcatatcatatatattcctgcccagaagcaattccaacgtctcttctcgaatcattgctgtaatcgttgaccatcgcataacagcactcggtcggatgtgaccctgcgaattccagccggcgtgatcaatatcttccagctctctactgagagcagtctccgacagggaataacacttctcgtcaatatcaaggggcaagttgatacagcaaaatttcttgctcatgcgcggtggtcgcccgagaaatgttgctaggctgatatcgatactgtataagcgggaaaaaatacgttttcttagttcaaccagaaagaagggaacatcgcgcgcttcttggatgctctcgtggagtccagcggcaagtagagcacaggctgcgtcgttgagccggcgccacgttttaagacctgcccatctgtcactttgagtcacacgcgaaaggagattaagagtttgtagcgtactttgatcaccataaaaaacagactgcacctggaacgtctgatacagaaagagaatatgaacgtcattgagaacctccaatgcctcgcaaaagattgcgcatttatttccaaattgaatgaggttcattcttaaggtctgccgttctggttctgtccggtacagagcatatggtgcacgaaactcagttgcggcaatactatgtcccttgttagtccccttatctctagaacagtagtttccgggattttcccctacccaacaagtgtaaggattgctcccattgtctcccagcggagattcggacccgtatactggtcgatgaggccttgcagcgtcatcaaacgatgtatttccacagggcggctgctattttcaaacaaacgctgtgacaaagctaataaatcggatcggaaatttttagaatgctgtagggtgacaatttcctcaatgactgcatcggcgaatggctgaatgaggatcgcgccgacatgcgactcgagcccgttccccttccagtccgagaaaaagtgcataacggtgttatttatcttggagctggtcagtgtttctagcagctgtgcgccctcgacggtcgaagcgttgttcatgaaacgagtagagtaagctggcccctcatcatcccgcccgaccggaagcaaggtcgaggcagcttccagatccccaaacaacatggtttgctcgcgtacattgcctaacagtgagtctagagaagaagagccttgataccccgtattagggtgtgtatttggtggcagagttggctggatggcttctaggatggatgtagaattaaaagccagctgatgtctggaatgatcgtcaggacgcaatttataacatagaggccgattaaatgaatcacgcactgcattcccggagattggggtgtaaaggagggtcgactccgcttgaacgcattcttcctgtagacgcactcatgggggatatctcgcccgacacaccgagcgcaaggttggcgatgatcgcaggctagtttagagagtcgacagggttcacaggatgcgactctcggtggccgctgtgcccgcgtactctttgaacgaccagacatattcaccacacgcacacgtggaagactggaagatgggggcggcggacgagaagcgggggcgttccccttatcagctgagtcgatgtttttgttttctaagagtgaaaggagacaagatattcatttgttcaggattcgataatttcaagctatgatattttcttcaatgcaggcaatgggccatcccaagttggttgtgtcctcccctcccaataactctccaccggtcgtgagcctatctcactctgtatttgagccgacacaatctcattttgcccccaaacgcgcagaatatttaatcccactagttttcgcacctgctcgtcggttgcaccgcgtcgcatgacagcttcaatgagtctcgggtatgccgagacatcctcgatcccactggcaacagcaggtgtcccatcaaaatcgctgcctgggtcaatttagtatgtgttattccgacactcacagcgaaccactcaccaattccaacatggtcccagccggcgatggaggcagcatggaatatgtgatcgaccacgtcttccaaactggccttgtccgggttgtcaggtcgaatgaacttgttcgcaaaaaagatcatgattaggccaccattttggcggagcatccgaaggacgtcatcgggggtatttctcagacgctttgcgagcgcataacacgccgaatgggaaaatatcactggtgcccgagtcgcagctatagcatctcgcattgttcggtgagacgtgtgggagaggtctatcatcatccctaggcgattcatttcgcgtatcgcggcacgtccaaagtcactcagtccattatccttgcctgtttccgttactgtgctggccgcagtagcgaatgcattgtcacagttgtgggttagagtgatatagcgcaccccgagctcgtacatttgccggatcacggcaagggatgaaccgatctgatggagtccttcagcaccgagcatggaagatattctctttgatttgaaggcttgtcgagcacatgctgctgtgtcgcaatactgcagctcgctatattccgctatcaagcgctttgccacatcaatctgctcaagggtatcacgaacactatgctataaattggagttgtcaacatcgctcttgagcgggaaagggccagatttgcaattacatttggatcgtcaagatgaagtattcggggacactgggttcgatgtcagtcacatgtaatgctgcatgctcaatagtcagggacctcacctctacaaagaccgaccaaaactgcccacccactttgccctgcttcatccgcttaagatctgtatgagatgcaagtccttcatacagccaatattaattagtccttgatcaaacgattggcaaacgaatagaaactataccctgatcaaatggaaggttgtctccataaatctgattgttgagctgcagtcggacaaggaatggaagatcgttatgtccatctatgagaggtatttccgataataccctggtcgttcgagccgcaaagttcaatggatcgatatcttgaggctgcactaggtctcttgctcttatcgcaacccagagcgctatagagatggaaccaatcgcaacaagcttgagaggattccatgatttccctctttgtgcgttgaacacaattacccgactatgattctcattatcactcgtggtaccctcgcacaatgatgaccccgttggccattgtggctcaattgcatccaagcgattcatagaggcggaaaagggaaagagatggccgcgccaagggagattcaggtatcatccgtattgtttgataagagagaaagactaaatcattaatctgtcgaagcgatacatttgtcaaatgtccgagaggttccatgctgtcggacagagtcaggagcgttacaccggtgacacatatcttgctatcataaagattcgcacgattaccacgaggcaaatgcggatgcaacgcagacagataatccaatggacattctttgacttatttgaccaattggcttgctttctcgttattgctgagggaaatcccgcgtgaggggcattcggagagagcacggagagagcaacaacattctccgagcggggccgccagagacgtttggcgttgcgacgttcactatcaagcaaaccccatatttaccgattaaagttcagggccatgcataaaactgacgatgtagcgcgctcgagatcgaatcatgcacacggtcagacctcaaaaacatcatgatttcacttcttgcaaaacaagtcaccctggcactggtctggggtgctgccaacgcccttccaagctccaatgcaagccctattctcgacacccgctccgtgcagcctgcctacgtaagtgtggcagtgacaacattgtggaccgaccccagcaagccgcgcgcaatcgatgagccggcactgacaaacccggtgcaaatggacaaatggctttctatgaacgtgtccgactacagcgacctcaccactaatagccggactcagacgcaagcgctttttggtgcacgagtggacatcatcggccatgagaatggttggtacgaggtggccctccccggacaggcgaccccaaagaacgccctgggatatcccggctgggtccctgctgcgcaggtatcgtttgaccaggaatacggacgactgctctcagaaaagcccttcgcgaaagtcgaaaaggctgccacggttccgctctaccgcgatcatagcctgaagtcgaagctaatggaagtcacctacgacacaagactccccgtcctgcgggagacaaaatcagccattgaagtcgcaactcccggtggtggctcggcttacttgtccacccatgatgcttccgtctacaagtctgcctcggatattccttatccgacgagccttgacctgatcaacacagcgaaactgttccttggccttccttatctctggggcggtatgtcaggatacgccgtcgactgctcgggattcacgcacaccctctaccattcgcatggcattgatattgctcgtgacgctgacgctcaagccgacttcactggtcatggcacccctgtcgcgcaggcggatttgcaacccgcggatctcatgttctacgcgagcaacctcagtgatgcaagcacgatttatcacgttgcgatgtatatcggaaatggagaaatggtcgaggcatatgattctggcactccagtgagaatcacgcctgctcgcttcaccgacgagtactggggagcagagcggttcttgaagcaccgaaagatctgaaaagtttttacagattttgcaaatgcttgcagagtgtttattttatgcatcagatgtaattggttaccaagcattcattgttatagatatgttatgtactttttgatatcgagtgtttcaataagaattcgaatttgtatatattgaacttggatagttgcgagaaagtgtatgaatgtagccagccatgaaaaattcgagactaaagggatgtcagaaaagcttccttatatgaatattctaaagtagcgcaatccccggagccatcaacgggtgaaagatgagattatgtaattgagatgagtcacgccaaatatgatacaagaatggtgatacaagaatgtctaatgatgttcccccaagaaagaaaagatctatcgatggtgtacatatgcaaagtcgtgccgtaacctaagcgccagtgacccggagcacaaattcatatacgccaagcgtaatgatagctgagggtaaagaacggagcatgtgaggggccagacctccgtacaagcccgccataccttcttctttagcgatggtactgaagcattgtaccagccctgtgtatttggcctggccatgctccacaggtgcctggcgcaatcgtgttcggataacctaagaattgagttagtgtgaaactaggataattgccgcagaggggaatacgtacctcatgaggatatgtgatgagacctgccacgagcttagcggaagacgcggcaccactagtactaacccaatggaacacttcgttccagaagggagtccttggcccctcggtagcttctaatgaccgattgagcctagttttcaactgttcatagagcaccagatgtagagccgtttcaatcgagccgaggtagcttgcgctcaatcctctataaaagccacccagtccctcatttcgcatgacttgcctgatgcaatcaacgctattgcgatatcgacgagtcgaaggaccaccggtgtgtgtttgtgttttgtcaagttgtagccgtgttttgacaagccatattggattcgttgctgttgaggttgcgagtccggcgcagattgcagcttgggcatggacgatagcagagtcttccgtgtgtcccatgagttgagctccaacacgcttgcaattgccgtatacgtaaaatttgatggcggtcgccggtactacaccggccatgcttggcccgaggcctcgaaagaaggctcgccagccttcagcacgataaatggaattgataatccgtagcgttttatgacttgatcgttgtgaggtttgaggaagggaggcgtcggagcctttttgtggttgataaaagtcggactgaagacgagttcgtaagacatcaagaggcgaagtcactatcgcggtagccattccaccgctcctatgattatgttagaagaatcaacataataccagctggaaaatacatacgcgcccgcaagaaggtgcacccaagaactaacagccttcttggtcggcatctcaacagggataccctcttctcctccatctgaaggagcatactgagtttgagcatttccacccatatttgcgtcgtaccttgagaagagtgagatcgcgaagggcgagtcccgacactttttttcggcgatatgaatttccgtgatccacgtcgccagatcacgtgtatagtcatattatcacgtgcaccctctattactttaatccagtgcaatggaaatatctacatatgaggaaggctggaagacttaagtaattgaaacagccgattttcactgtagttatatatatatatgattggcacataaagtacggagtactctttgcacattatgattgttggccttggtgcctgaaccgccaggtcatctgaccgccctggcacggtatatatggcctacggtgcgttttctctctctgattcacaattctcatcgcactaaggccaatgtacataaaccagtgccaagatgattacctcatcagagcaaggtagacctcagaaaagaaggagaattgtcatttcctgtacagaatgtcatcggcgcaagcaaaaagtatggggcaacacgaaagcgcatgaacaaggaaaagaaagctactaaagattgaatagtgtgaccgccagtatccatgctgcaactgcagcaagcgaggaacgcaggtatttatatttataatagaggcaatactgcttttggtctgattggcgactgcaggatctttgccactatgacgctttaccaaagaactgccaacccacccagggcagttctggggtggatagccccttggaaatcactaccaacagcaaggccatgcatttttacccacctgctagaccgggctgcgagcgggctagcgagtctgaggacaagatcagaaattttggatattccagctacggcaatcacaactccatgagcttattacggaccgtagagctttatggaggccgggccaaaggcttactgagcccctttcctacaaaccagtcacctttatcaagcgaggcagatcgcaagtacagggaattagtccgtcagctgccctcgcagccctgcatcgagatcttggttcaaacgtttttctccgacatcaattggcagtatgacctactcgacgagaaatcctttagagaagacctagatgcgtggggaaagatctcatactctgaccttcaagcaggcttcgcaagattggcgctgggaaccattgtgtttccagcgttactatttcaagtcctcgcacaagcacttctttttcactcccctgatgatgacatgatcaattcgctcatcaccatggctgaaatgaccttccatgatcttggggccgaatatagtgatacgggtgttgagttactcgcggttctgggaaaagaggacatcacgatcgccacggtccaagcaggtatgctacgtgcctcgtttctgaaaagtagtggcaaagttattgaatcctggcatgtacttgggacaacaatccgtgatgcacaggaaattggcctgcatactggacaaattatgtgtggacaatttccagttgggcccgggcgcgagagacaaaacatcagtctcgttggtcacagagtttgggtggtcttgcatatttgggacatccatatggctgttgttcttggtcgaccgattgccaccgatctacagatagatcgcttcgcttgcactatagaagaagacgaaacgcggcgagaactattctcgcattggcaaaccgagactaacccccctcgaccatttgacgtcatcctcgccggctttaatgtagcctatcgatatttcaaggacatccacaaattggaacatcacagtgctggcccgcaagattatcctacggtcgaacatattcacggtgcaatcaagagaaactcagaaatgttaccctcttggtgccgtcttgaacacccagatacaaagtttgatcggatacaagggtgtcaatggttacctcttgcccgggaaggactgtactcactcattcaccttgttcttctcgcacttcatcgaccatacatattctctgtggccaacagtcgcacggaagcgctcaaagctggagtatccattcttcgtgcacaggaacgactattccagcaatcccagccgcaccattgcaaggtgttcagtccggtctacgcttcttttgatgcaattgttctccttgcagcactctgtcttgtttttccgaacgagaatcaagaactacgagcagactgtatcgacgttgttgaaagagggatgcaaagactgggaatcattggtcaatttaattccatggcaaagtcagcacatggtgttgtctgcagcttgtaccgtcgcctaacgcatcggttaaacctccccggggacgttgagcgagctggagcattttccaacaacccagaatggatctctcccaacagcgatacatttatatataacgggacactgtcagaactctcttttgatgctgttttacctccgcgtccaacccatgacctgttcttcaaccatatttcaagtacacaaattcctgttatggcgacaccagaaagtttaccctttgacccgcttagtgtgagcattacagatagttggaattttgaaggcgtcttttcagatgccagcttttggagtcggatgaaccagcctaatcattgaaaatgtacctatcgccgattgcattctattcaactcccgcaaaccagaccgcattgtcccccacattgcgatcgacacaatccagctggccatagtactggaagtgggaacctcgttgtttcagatcaacttcttttgacttgtggggatggactcctacttgcgcttagcagcagccgcattcagacagttgtcaccgtggatgagcagcgccggcttgtccagcttcgccacgacaacaatgatggtctagctaaagggcttgctgagctttctcaggtcgcgcttgtgcagggcttctcactgttcgcgggtgggcattttcctctccgctatatcggtaccaggcgtccatgaaacacacccagcgcaaattatgtggatgtagatgtagatgtcggtttcatagtctcggtagtatccagagaccgaagccacgcccccggttatcgtaggatgccacatccatggactcggccatcttggcaaataccgactaggatgagccgggatgcaccaagatcgccgcgctccgatagatagtcaagtcctgcgaccatgtcctcgtcttttatgttgggattttcagtcgtcaagttcgatatctataaaccccctccaattgtttgcatggcaactatgacgcattagattaaatgaacattccaatcatatcaacgttgcgatctccattttagtactccttacattatcgccgataaaagcgggtcaggctggacccttaacgccgatgaaccaatcaaagaagaattgaactgtggggattatgcaacaatcgatctccgctggctaccggatttggcaatgtgcgatgtacatcatacagtgaagctgggcgcagatggaggggcaagacttatataaactcaaagctgtccgctcgctcacagaatttaatctcccactacctgacttccaatcaaacaagcaaaaatgacacccaaggtcctcgttgtcctcacctcctatggcaagttcgccgccacaggaggttcaaccggctggtttctggtatgcacctctgactgcggctgcaattgagaaacagccattccgttttagatgttcacaaatgctgacgatgttttccaaaggccgaattcgcccacccttatgaggtcctccgcaacaaggtctccgtaaccgtcgcttcgcctaagggtggagaagccccattggaccccgcctccgtgaagatggctgagtcggatgacgtgtcactggctttctttaaggaggagaaagccctgtggacgaacacgcataagttgtcggatatactcccgcgcgccagcgagttcgatgctatcttttatgttggtggtcatggacgtatgtttagctcctacatctaatcaaaatatatgttctaacaaaatgaaacagccatgttcgacctaaccgaagacccagactccttggccttaatccaaaccctcgcggccgccaacaagcccgttgcagcggtctgccacggaccctgcgtgctgctaaaagccactgcgccatcaggcgtgcctctcctctctggcgtgacggtgaccggactcacgaatgcagaggaagacgccacaggcctgtcctcggttatgccgtttatgctggagacggagctgggccgtgtcaccggcggcaactatgtcaaggccgccgagatgtggggcgagagtgttgttacttctaaggccgctggaacagggtcgattattattactggacagaaccctgcttcggcgccaggcgttgcgaaggagatattgaaggccttggggttgtaaaggaaatttattcaaatgtcggtgttaccggagaccccaacgaatatgcagaataggaataaccatctcacttgttctggatcatatgtattcaacacgtcatgcatgtctcatgatttaaattgggtttacagattccgtaggtagaacaaattaaatctgatttgacgtttgattcttttcatctttaaaccacacctggacactcgataacaggtgtgtataggagctcattcagtattcattccaatcttaatcattactcttgtaaccttgttcgacatgtcgatggtttccagggtcccttttcagctctcaggccggtatgccgagcgaaaccgatgagaagttctcaacggcccaggcgactcacgtgtaactggaattcaaatcatccaagatgaaggtctagttaacaaatggagtgacaaggttgttttggtcactggcgtttcatctggaattggtgttgaaactgtgcgcgtcttggcatctaccggggcgactatctttggcacagcccggaatcttgacaaggcgaaggaagccttgaatgatgtactcgatactgggcatttgaagcttcttttcatggatcagacagacctttcgagtgttcgggcgtgtgctgcggagtttcgcaaagagagccccaagcttaatattcttatcaacaatgccggggtaagctagtcgaaacaaatttctcaaagatcgtccgcccactatttgatcgttataggtgatgaataccccagaaagtcgtactaaagatggcttcgaactgcaatttggaacaaatcacctatcacatttcctactcttctatctactgaaagatatcctactggaaacctcaacgcctacattccattctcgtgttattaatgtttcctcgtcgggccactgttatagccctatccatttggacaatgttaactttgaaggaaattataatggatggattgcttacggagcgagcaagacggctaatatatatatggctacccaaatcgagcgtttgtatgggacgcaaggtcttcatggctatagcttacatcctggggccttcgtgagccccaacctccagaaatactcacaggaagaaatgaaagcagcgatgcaggacaagcgcgccctcgcgtatttgactagtatcgagcagggctgcgcaacgactatttatggctctgtctcgagtgaactggaagggaaaggcggattgtacttggaaggagcatctattgcagttcatccggctccctcaggcgcggatggactagaatatggatacagcagttgggggtttgatgagtcaaaggaaagggagttgtggaagttcagcaaatcttgggtaggagtagagtaaatgttaaggattatcaacatcaccatatatataatcaagtggatgttttagttccagagctatttgcttattgctagtattcaattaattgacacgataaatcgatagaaaaaggcaagaaaacattgtataactcaacaagttaatgatcatacagtgaagaaaaagaagacattttgttacgagccaattcgattcagaagaaaagagtgcaattcaaaccaaattctaagtacaaagaagaaagaaaaaggagaaactatttgagtgcgcgttcttcccttctcatacccttgcgtttgttctcgcttaatctcgtttgtcaatttgggaaggtgtgagggcgaggtcgttcctgcctcgtctggcaagtacgatccaaagtacgatccttcccagattgtcacagatataatacattcgcgcacatggtacatcaaacgctgcctgaggaaatccgaggaagatcagagtttgctggagacaaggtagggaatgttcttggcctcgtatagatctttgtgctcagacttgatgatatccgcgccctagattatattacgcattagtcttaccctgggagctggcggatctgtgactaaccttctcgccaatcatgtagaccgagttttgaatacggcaatcagggatcacggggatgatagaagcatcggcaattctgaggtttcggactccgtggactcgcagtttggagtcgacaacaccctggtggatgctcttcgagagacgtgcggtaccgcatggatctgtaaagtaaatcattagacttgtttcgggacattggaaggggtgatctcacggaatcctgtctggctgcgatccagaacagcccggttcatatcatcatcggaatcaaggggcatcttccaggggtattctgaaataacaatgtccttgaatccagctcccgtggtcaaaagatcatatgtccagcgcacaccctcccgcatggccagaatgtctaagtcattgccgaagaagttgaggttgatattcggctgtacctgtgcgttcgagctgtttagggtgacttcaccttcagaaaggggccgcagcagatcaacaatgacagtcatgtgatttcccttgtcaggcatagggtaatgccactggaatgcgctgctgaacaagccgacgaagtccagctcgaagtgaggttgtcctgctggcccgaaaggatccaatcccccgttggcagccttagcctcgagataggcagggtacttttccaggcgttcgtcaattcgggggaatccgacaagttccaggaatccggagcttgcaggaccagtcttgtccttctgataagtggacagcgccttgtcattgagaggaccaggcctgaggatatggttatctaagctgtatccatccttggtttcaagaacgaaaggtacgatgggatggtcaagaagatgctggccgacgtgaggggattccacaatgggggcgattccgtgttttgccagttccgctgctgggccaactccgctaagcatgagaagcttaggagtctcaaagacaccttgagagagaatgacttctcggcgggcgtagacgctgatctcgtgaccagaagcttcacttatcacagtgacaccggagcagatgcgtgtggtagggtcgatgagcagcttcttcgagttaacgccatagaggattgtcacgttaggcttattcttcagataaaggaagctaccctggcgttcaccctggtggatggtatcaacacaatgggttagacctttcatctcgccggagtagatatcctcgctcaggggctggcccttagaaacccaggcctcagtgagcgcatcacggaacggcttcatctccggcaccaagtcggcatgggagatttgcaaagggcctccggttccaatcttactcagttcggccggatacagcttctcgtcgtcatggtaggtggcacatttgcggaggtactccacacaggaatcccaattccagtcatggccaccgaaggcctcccagtcgtcaaaggtaggcttcgagcccggaatccaggtgaagtagttggcagttgaactaccaccaagagcctttccgcgagtgttgggtttttcaacacgctcataatcatcgcgcttgatcatagttgtcttgtacgcccagtcgtacttgcttccgcgaagggtgaaagctttcgaaggggtcgtgatttgctcgatctgatcagggttggggatgccggcttcaacgaccagaatgcggacgctggggttctcagcaaggcgaccagcaattgcattgccagcagtaccaccgccgacaacaatgaagtcgtactcagagccgttggaaacaaaagccatggtttgggatttaataagacttgtgtgtgtgcgtgtgtgtgcgtgtgtgttcatagcaaaaactaacgagacatcgcgtggatcttatattccactcttcgcatgtctccaaatagaccatcttgccgctcttgccggatagtaagagatgtgggaaatggagcaacatgttttaccactagggccaaagtcctgggtatccatttgggggatagaggggccatcttactgacaagagaggcccttgaaccttgacttggtagggctgacagaaagggtaaatttgagttggaggtgttctagaagggacttagctccgaaagtgacgttttcgacccctcatgaggggaaaaccccttctccgcacgagctttgtcagatttccagccaatcagagattcggcatatgtcgccaggaacggcaataactcggccgggtgtcggtaaaccgcctgttgcaaagcatctccactatattgtaagctttccaaacccacttgttcaaaatatttggttttgtctcaatcccctcacgttaatatggaatgatcaaatgatttggagtgtccctcatggggggtgctgtcaaggtcttgactcacgtttaagatccagcccaataaaagccaggccgtttcctagaatatagagtattcacaacttatcatatcaattgaatatcccttgtacaaccaatcccaatgccgaaccattttaccttggccgaaggtatagtaccaaatatctcaagtcaacgttcccatcctgacaccagacaggtcaaccggttgcggatccatccgtcagcactacgttgcctacctttgggggtggtggcctcacaacattgggtgacacgcttctcattgaaacactttcgcatttcaaccgcgaacgtatacccgaaaggtctgatatcattcaacataatgcttggaaggaaaagatatcctaactctataaacagagtcgttcatgctaaagctgcgggtgcatggggagaatttgaggtcacaaacaatatctcctccctcacgtcggccaagttcctcaatggtgttggaaagaaaacccctgttctattccgtctaagcaatactggcggtgacaggggcagtgcggacactgttcgcgatgtgcgaggctttgctgtcaaattcttcacggaggaaggtaatcatgatattgtagggaaccacattgtaagtgttcaccctaagttcttacttttcatgttctaatgtctccgaagccggtattctttgttcgcgatcctataagatttccttctctcaacaggagccataagagacatcctgccaccaataggccagattggcccatggtgagtgctaatcaaagttactgagttgcggatgaagctaatcttttagttctgggatttccactcaaaccaaccggaaagtgtccatgctctgatgcacctttttggcactcggggtattcctgattccatccgtcgagtgacaggtttcggtgtacataccttcaagatggtgtcagctgatggtggcttccgctactgcaagttccacttccgaccaactcagaatatcacacacttttctggccaggaagctactcgcatggctggtgcaaacgccgacttccacaatcaggatttgtgggatgctattgctcggggggacttaccggtctggaaactttacgtccaggtcatggagcccgagcaggctgaaacctacggccgtgctctgtttgatatcaccaaagtttggccccacaaggaattccccttgatcgaagttggtcaaatgactcttaacagaaatgtgggtaacccattaccttagacacgaagcaagtgctaacaagccccagcccgagaattattttgccgagatcgagcaagccgcattttcgccttctaacatggtgcctgggattgcaatgacacccgatcctagtaagttcacactgatgtggtcgccagagggggataaaccactaaccattcttatctataatagtgttgcaggcacgtatgttcgcttaccccgacgctcaacgataccgtctgggggtgaactacacacagcttcctccaaaccgtgcaatatgccctgtatatgcgccattcgagcgcgacggcacaggaactataacccggaactatggcggtgacccgaactatgtacggagctcactaggcgctggtattcctagccaggttgtttccaacgtacgacacactgagcgcatcgcgcataacgctgtcctcggccagaatgagattctagttgatgatgaggatttcattcagccccgagagctgtggaatagggtctttgatgagcccgagagaagggagtgggtgtcaaatgtgtctgagactttggaagaagtgcctgatcagcttaaggatgctgtcattgccatgttcagcaaggtggatcctcgtattggccaattgttaaacgataaggccaagaacagtgcgcgtctttagctctttggttacttttgacactagatgcaatgaaacacgttttctatactcatacgactctttcttactgtccattacacgcaggatcagtaataaacaactcattgatgtgcaagtggtatcacatggtgcttgccctaggtgcaataaggtgttagagaagagaacaccatggggtgactactagaagaagaaaagaacattgaaggtgcctgcgtgctatctctacctcaggagtggttttacggatggataaaatgtccgcttagtcatcctgcgctactgttcaccgattaccacgtgatcacgggtcctacctccacactgttgtgtccctccgaggtccattgtttgtggccacccgcacattataggcctttcatttttttgttcttggcacatctcgcatcccgtccctgaagaggctagacaccacttatttgaatcaggatgtcgaatactacatctccagcctccctaaatgctgcttcccagggtcatactgttgccgttagtctacttctaggggcgggagcacaaccagatttatgtcatcctagtggtgaaaggaaaggcagtccactgaattgcgctacccgaaacgctaccgatattttgcttcctaaatctctgctcgattttggcgcagatgtgaatgccagtggaaatgatggcaagaccttattcatgcggcaagaattgacaatgctggttttgctatgctattattggaatatggtgccaacatcaactcggtatcagccgacggatcaactcctttgaccaccgcaattatctacaacagtcataatgttctacgattgttccttgatcgatggcatgagtattcgatctgcccccgtatgaagggccccaaccttctccaggtcgcggcactatatgctgatcctgctacgctgccttgagcatagatgcggaatacgagaaagataaacaatgtgcctgtgagagcccatagtacaccctaatatcaagaggtcagttaggtatactaaagcaatattgccattccgttgaatacccactaaaaagactgcctcaggaactctgctgtgctggtcatcaaactctgccattatgactaaaggttcagtatgaagttctggatagatctgtcaaacagtaatatgacaagacgtgagaaatatatcaaccatggaactatatcgccaagagatcagatatatcattctttgttgatctctcgctagtgctgatttggtcatcctggacataattttcgaccagctcagttctattggtgcgggtaagaaaaagcatcggttaagtcctttgagaatatcaagtcagataccttgcgccatgtgaattctacttgaaatgagagtgccgggacttcaatattaacgccactgtcgttaatactatacactctggcgaacaaccatggtcgtgcagcttgaatgtgatatcgaaagactcaaaatccgatgatagctttatgagtgagtagttcgttccgctggaacaattatcaatatggttcacataggacggatatagtgtatcttggcccccgcttgatctgttcaagtatggtgcagccattcatcccatctaggaagcagcccacttcgtatgagtgcagtggcttaatcaaaacggacatggtcggaaaggcatactcacgatgattgcacaactaaccgaaaggtcaagggtgtcaaagaagtgacatccctactgagtctctcgatatctccgggagaccaagaacgcaaattcccatcgagctcggaccccgacgaaatgatcttcgtcattgataaaattcgaatactttgggaagccaaattactccatgtccacgagcgttgtgatcgcccactctttcgggtaatggcgcctcaatttcgacttgcttatcgccgttgttaagtagcgtacatcggcttcatggcaggctccgaatcggtttctgtaagattttgcagtgcgatattaccagaagaccactcggagtttgcttccggggggagcgtgatcaaaaatagcagtaaataaaaataccgattgatctcagcagcgatttgtacgatttcgcgtaattccgtaattgccacgggtataggatactgaataaatatcgctagtcggatctaaaggacctaggttgatactagattagatatgatccggctatcacaccatgggttgcttcgatcagaatctcaaaggataccatcaaacaccaattttgcacacttattcggtattaatacagaaggtgctcgggtcaaaatagaaagagttccaagcaacatgaaggtataggcatgggcagctttgacccgaacgcgcagtcttagatccgcattgagtgcgccacaacggaagtgcagcaaacccaatgtgacaaagaaattataatgcaatcccgagtcctagatctccatgacatgttcttcgtcctctgatcgccctttcccctgtattgtggggatgtggacgttaatctcatcgcgaggtgagtttttcttcgagcaaaaggagaggagaagaaggaggaattctctactagcaaacaagatctagctacggagtaaatagctaggtgaagccctacaatctaggcatcagcatgtgattggtacgtgactgtcataatagttctcgatgtcttagtcctagttgatataatattcaaaaatacctgtagatccctataactggttaaaaatatatataaactgggggatttgacgattcttaatgtcgtctcgagtgatcagccgaagtggtagagttagggttgtcaagggactgtctggctcatctttttgtctctcttaaaatggagtgagctggtaaacttgaagaaatcctgagccccggttgctaaagacgctgaaagagaaagcggtgacgatatccgtggagatctagaaggtggagacccatggaatgtaagtgggccgccccacttaagcttggaccttccgtggtcgtgatagccggatatatcaggcaccattttcacttcatatttacatgattcaggttgttctcgttcttcttcttctttctctctctcttctctgcatttattagatcgtaattccaagattttcaatgcacaccgacagagcaatatattgtcccgaaggctcaaaaaatactagaccgcctgaacacgcagctgccatcctcagtctacctaccacggcaccctctgctcaggacaaatatgcactcatgcaagagtgtaaagacacgagatcaagccacgggcgaacactttaagtatcagcatatagtaggctgcaagccaaactgtgcaagatatcagagattcgacttgtggaagcttcggacagatagtttgtatccaagtttcagttgttattccgctttaaaaaatgtcgagatgagaaaggacataccggagttactattcacataggtaactctaagagtaatgttgtaaggatatgacagggacccagcgaatgcggaaacccacctgtgcaagcaatggcgagccatgtgtatactggaagatggcaactagccttgcatcaaaaaccattggccctttctaatgttatacaagtagtacttggcacagaaggagttcttggacgcgtggacggaggtcttgtgtcacctgtcgacatttatctgccccggtgggttacctgtcaagtcacaatggaaggaacgagctcagaggaaagagcgaaggactcacctcccagtcaattgcgccatcgcacaatccagaatctgtctactcactctgctttctctctcctccctactttcttcctcattcttcttttcacccgttttgtttcccatctaaagcgacacgaacagtagaactcatcaatcttttatcatcatacgagattccaatcatgcctgacccacctccaaagggtaagggtattgcagtatctgatccagagccgatcgatgagaaagttgtcacggctctggtaaaggatgaggcccaagtcaatggcaacgagttatttgctgaaaatgaccgtggctctgaagatcttgtgattgtcactggagctgatgtggctgctcatcttttgcctttgcgcgatgacttggaccctactttgacatttcgcgctgctatcctgggatccggcctcgcggcctttctggctgtcatgacccagatctacagtgtaggcgaactcgcatatcatctcattcttcattcccacagcactgctaatgaatatacttctagttcaaaccaacccaagtcaatgtctcaggcgttttccttgttcttgtttcctactttttcggtaccacctgggccagattcctcccccgaggtgacaagtttgaggcgagatggagggcacgaggtgagcagggcagactgccttggtggattactgtcatcaagtttgtgaatcctgggcctttcggtctcaaggagcattcgatctgtgtgatcactgctacagcagccgggtacgtcacggatgcgacgactgtattcgcggcacaaaagttgttctacaatcttcctttgagtcccgcaacggtcattctcggcattatctctatcggcctctttggatgtggcctctgtgggttcatgcggccttttgctgtctgggatgtcgaggctgtctactggggtacgctgcctgttgtgaaatccatccaagggcttcactgggacacggtcgaaaactccaagccactgaaatacttctggtatgccttcacgggtatgtctctttacgagatatttcccgcatacatctttccatggctcaactccgtgtctattccggtatgtattctatcttttagcaacgttacttgcgccgtacctgactagaccccgaatgtctagtgtctggcttcacaaaaagcaactggtaagaagggtgccatactcaccaacattttcggtggtgccacttctaacgaaggcctcggtctcttctctttgtccttcgactggcaatatgtgagttggggtattacgccccagtgatactttatattaaccaatgagactggtcaatacagatcgggtcaatttcaactgctattcctctaaagctgatacttcataccaccctgggagctggcatcagcgccatgataatgattggcatctattacggaaatggctggggctcgagatcactgccttttatggcgagtaaccttcttatggccaatggaacaacttatcccgtgaaagaggtgtttcctggtggcttgctcgacaaatcagtcattgaaaaatatggattgcctcagatcaccggggcctttgcatttggtctgttcacggccaatgccgcagtgagtacaatacttctatcccgaaccacttgctaagcattacctagattggcgccctcattctccactgtatccttttctggggcaagggcatttggagggtatgtcaacaagcaagggaaggtaagcataatgacccacaccacacctacatggcaaagcactataaggacactccgtggtggtgcttcgctggcattctcgtcgtcagctttgtccttggccttgtagtggtgatcaaagagaatatcactcttccagcctgggcatacgttgtctcgctagcactaggagttttcattacgccttttgtgagtattctcgaacacgaaattttacaatgctaatattatgatccagagcactatcctcttcgctcgcttcggcaacggcattgccactaacaacctgtcgaaaatgctggctgggctcatgcttcccggacgcccagtcggtaacatgtatttcgctgcttggtcgcacaatattgtcatgtcttccgtctccgtgtccaacgacctaaagttcggcgaatacatgaaaatacccccgaggatcatgctttggacccaaatgtatggcatcatacttggcggattcattaactatgctatcttgacttccgtcatttcagccaacagggaccttcttgccgagggtaacggaaactcctcctggagtggtgcgaccatgcaggctttcaacactaaggcagcctcctgggccttggccccttacttgtacaagctcggtgccaagtatgaggtgattcctattgccgtagccgttggtgctgctgcagtaattgttcatcgggttttctatcaggtcagcaaacctcaagcagaccaagattgttcaactagttcatgctgacaccattttacgttagttcgttcccaaaatcggacggtttgatgtttcagaagtgaacctaccacaactcatccagtatgccggttcttatacatcccagacacaaacctgcactgttctcagtgggctactctgtggcttgtttacccaaggctaccttcggaactaccacccacgcatttacaaagattactcatacgttattgctggggccttcgacgccggaagtctgttggttatcttcattctctctttcgccgtctacggagcgggtgggccatcccatccattcccaacgtggtggggaaacaaccaaaatggacaccttgactggtgtcctgtttcgaagaaatgacaacgggcacaaagtcggtctcagataatggcgcatgacggtcgatcagagtcatgaaatgtcttgagcgcaaatcttttttttccagcgccttcaaacatttgttgtccccctggaaggttgatggtgacaaccttccggtaattggatctgtaatggatccttagttttaacataattttcgcaacggttatgaatttagcctagatgaacaatctaatcgttgcaattatttttcctcgtctatattgggtcgtatatataaagtattcctcatggtagacgtagcgatatagatgataggtgctttttcgggtcttattgatccctgaatgcccgattgtttcctaaaaggattggcaagatatctgaattgctatcagagaggcttaatattcaaggtaccttacctacctcaaaatgaagcttttgacaccatacaaatttatgtatcgcgaccttttatgtggtttactcgccatatcatcacattcttcttccaagattagatgtacagtcggaaaaggcgggagaggccttaatttaaaggtaattgccaaaacgagataagcatcggcggccatatttaagcgatgccgaagaaccaattacaccattgaagacattaatccagatggcgtgtctaaatttccgaatgatgcaactcgcttggaccccgcctctagagctaccccaacatgtctgagtgttatctaacaaatgacaagtcattacgaatacaatattgaattagtaccaacgctaattgtccaatacagacgttctgctagagctaggtcgcttattttgcgattgtcttattcatgcctgcggtcacaacataacaactcttcctaatgcataattgcgtgatagtcaatgcgacaacgtcgcatggttataaaaggctgaagtagaccgtttcatgctctccttgataagtttcccaaggttccgcctttatctctttctacaattccaaagatgtcgataaatggaataaaaacagcgcatatatctgctagtagttcagatggctcggacgaagagtggcagaagagtggacgtaacaagggagaaggtacatttgagtccagggagggtcatcacttctaccggccgattgacagctatgagggactgcatcgctgggatccgaattttcaatggacggaacaggaagagaaaaagattgtcaggaaggtcggttaaattccataccactaatcaattatcaaatgactgaatttggacagattgatgctcgtgtctgcacgtttgcctgcgtgaccttctttgcattgcagctggatcgaggaaatatcagccaggcactagcgagtacgcttctggaagatcttggaatgacaagcaacgattataacttgggtcagacggtttttctgatctgtttcttgttggctgagatgccgtcacagttgctctcgaagagaatcggcccggaccgttggattcctattcaaattgttgcttggagtttggtcgcggcttgccaggcctttttgaaagggcgtggctcgtatttggcctgtcgagctctgctaggattcctagaaggcgggttgtgagtaattctccttcacataatcttaacgtgggtctgaccgtgtttttagtatacctgatacgattctttttctgtctttcttctacaaatctagtgagcttccgaaaagactgacctgtttctggatatcctataccgttgccggaattatcggctcatttctagcctttggcttcctacacatcaaagacgccaacggcagcggtgcctggagatatttattcgcgtacgagggtcttataactggcgtgattggaatcatcgctgcattctggatgccggcgtcacctgtacaaaccaagggaggattacgcggtaaggacgggtggtttacagagcacgaagagaagatcatggtaaaccgcgtgattcgggacgaccctagcaagggcagtatgcacaaccgacaagcggtcaccccacggcgcttctgggagtcgctcaaggattaccacgtgtggccaatctatgctctgggtctcatttggatgatacccagtacaccatcccaaaattacctcacgctacaactgcggtcccaggggtttacgacgttccagaccaacttgttgacaattccagcagctgtcattgcgattatcaccatgatagcaattacctgggttgcggagcgtacaaaccagcgccttctctggggcgcagcagccgaagtctggaacctggtactgctcattgcgctggagttgcttcctcagaaaagcatgccgtggcctcgttgggcgatccttacgcttcttgtcggtgggccgagtattcatcctgttgtggtcgcgttgacttcacggaatgccggatctgtgcggactcgcactgttgcttctgcgttgtataatatgtctgtgcaagtgagcaacattgcaggtgccaatgtgagttcaattccttgttttactctagatatggatagactatttagaatactaacatttatgaacaggtgtaccaagcaaaggatgcgccatactacaaaaaaggaaacaaagttcttattgcattggctgtcgccagtgggttccttttcatcttcgccaagttctactacgattggcggaataggtacatattcagaacttgtaaatatcaatatggatcagctttgctaacttataacagtcaaaactctgcaaaatgggatgctatgacaagcgagcaaagagagatttacctgcgtgaaaacccggtgttgactaacaagaggtacgttgactagcgctgcagaatataactactagcagtgctaggaactgactatggtgtatagaattgacttccggtttgctcgttagagctatctgatcaggaatttcgagaaatttgcaatattggacatgggtgttgcgatggaataaacatgcagatcgctgttgttcatagaaaatccattatagtatcatggctttgtcaaagaaaggaattcatttacgtcacagttaccaagaaatgagatttgaccttaagatagcatgaaataattcaatttcacaagaagttgatatgcaggcctatcgcgaatagtccgaaattgcaccattgtggctggaatgaggttgttcggagaatttgggcaccatacattgatgttacaatatgccatcagggataggcttggacacgtctttcttcggagaatcatgtacggagtacatactccgtacatgattctacatttccttattaattggggagattgtatagatatcaggaccctgaacattcaatcaccgccttcttgattggttgcaataccgaattctgctataatctccgacactgtatagttttctgtcgtatgaagtagttagtgatgacatataaagcagtccaaactacatatgacaaaagtgacttaattttgctcggggtttacataggtatctaccatctcatacttttgtacggagtatggggagtttgacacgaaagcggtgtataaaattgtaaggcggtataactagaaagcggtacgtgtcaaggcaggcattatccaaattaggaaggcggcgattcaatttacaggcagaggggtcagagccaagggggttcatatcaatccccttgatttacgatttattcaaagtggactgagattgttgagacagatcatgcatcattatatgaactcctcattctcccggcctatttaaacctccattcaagagaccctcaagcctttgattcactctctggaatgtaaggtgtctcataagggcgctctgcctgtggagtaatgcgcgccaagtggcgacgctcaccagttgtccaatcaacaattgcagaatgagccgtgacacggttctatttatatgcagacattagttttttgagccgttaatctataatcaggatttcactcacatcccagacaacaacggtcttcggagcccatcgaacacgagcttgataatcaattccccgacccacatgagccagcaggaaacctagaagggcatcgctctcctcctttttgagaccgacaatactgcgagtgactagtcttggtgtaagcacttgcttttctcaaggagcatgggagtatacttacagccaccattgacgaaaagcgctttctcaccagttaccggatgggtgcgaataagaggatgctcggtcttgaccgggtcccgtctatcgactcccccacgctgtagactaaactcggcctgctcaaccccggaatgcacagccttcaacccgtgcagacgctccttgagcgctggcgaaagccgattataggcctcgacttggttgacaaaaacagtatccccgcctacttcaggaccgtcaaggaggtacaagaacgtggtaccgggtggctgctgctcatatgtgacatcagaatgccatgcgacactgctgttcttcgccgcgagatattcatcgaattcccaggaattgttgttccggtgcacgagatgaatctcgggatatccctccggagctccgctagttgggtggatatggtggcggccaaagtatcctccgaaatcgagggcctcttggatgggcagatcggcgagatcttggtctcttaaaggcgacaactttgcgttgggcgacgagtagagcgagttgatcctttccggcagcggtgagcttgcttaactgaacgcctgtaacctcagagccgatggttggagtcaacttttggatcttggagccttcggtgaggaggtctttgaaggaggggtcggcgtcttttccgtggtcgacgtgcgtaaagggttcaagaggagggtactttcctccatagtcccatacaggcaggtagtttggatgctgcatcattgttagggaaagctatatgtgagagactcaaaggtctagccatgacgtacactagcagtagtctttcccccttcctcgtcaattattcttctcactctgggtttggtctcggttgttgaaggagcggcctttacaggaacaacaacttccgcggtgggaacttgagcaatagatggtgccatgttgtgctaagagattggtagattttgacgttggtcaagtttgagcaattatctcagggatctgtaagcaccatccacttcaatatatataactttcaattccatttgcttcgcgccattttgtcgtagaatcacgtatgaattccttggtgtccgatatacgcgagagtgataagcatcatgtgagaggatcagatacacaaagcacatcaacattgatgccgtgatatccgttctatcgaatgactcattcagcatcataagacaacaaatagatcaagcctgacgtgctataaccgacaataacatcatttacttgccaatgggaatggtatagagtgtggtcttggatgattgataatgtcgagatggcgtgatatgatgcaagtgacaaccccgcaaacgactctaggtccatgatagatgcatgccaaactctgcagtagcgatgacagacgtggcatttaaatggaaagagtaagaactcgatggtaggttcattatttgtttcccgcaaggcgggtaaggttgccagtgatgataccacttaccctaggaataaaggcttttggactctttagagagaaaataggcacaattcaaggaagggaaactagagagtttggtatgaccgagttatattgtgatgctaggtacgaagtgcaaatctagtctgtgctatcatgagtggatacccattagactgactgcctttcgcatcttattccacttctgtgttatacgctgaatggatcattgtcgacattaatttggctggttcgactcttggctttcccttggcgcggattaggcaaaatatttcaggatgctagatgtgaccattaggctcgataggtttgactggactgtcagttctcagtcgcgccgcgagttttattgtctccacggagcaggcagcatataattcagtcagatgcgatgatcaaaattgaaggatgctaaaagtaacatgtgaggtactgaaaaattcgcaatcacattgaaagtggaagtcgaaaagtgacttgctgattgaggagtcgatctcgggaaggagttagcattatccgaggccacgtggtctagatcacgggttgtttccccaggttctccttccgagtcacgtgactaccatccacagaaactataaatatctgacttaatttcaaaccgaaaattgtctaccagaatcataggaactccaaatccgatttcatttagaggttgctaaaagtataatcatagtcaatcaatcctttgcttgctccactggtctaaatatatatatctcaagttctctatcagcctatcgttttttcttctttcattctaatctccggccccaaaaagagagcgaacgaaaagaggagagaaaaatatagttgtaaaaaagagtctttgagcatatgatagcgatctatctgtaacaacccattccatctcaagtttcccttttctctcgtcgcccgtaagcttctttgtttttatagatagcttgttcctatttctttaagtatttgtaccccgaatcgcatgtagattcgtaccgaggaattttttcgagactcaactttctaagaaatatatcttcaacatgtcggaacgatacaactttcgagtagtcctcgcgtgttcggagactaccgccccaacaccttggaggaccaccaacagatccaactccacgcataaagctcaaaatagaagacctggaccttgacaaatcctacattggcactttgatgccacctaaacggccaccgaggccaaagaaaaccagaccatggaccaaatggacaggaagcgagcttaccgatccagctaaactttctcgtggctggcacatgaatgaggacgatcttgagattgagtgagacggccttgaatctaagtgtgcaaacaacgagctaatcagaactcaatagcgatgttgatggccaaatcaaaagatggcatgagagaattgccgagaacataatgcctcatgtttttttgccaaaggctggaggaatatatggctacaaaggcctaaaatgagtgagtcagctatattggtattgcttgtgtgcagattctcaccttgttaaactatagccagatgaggttcccggggtctgaagagctcagctgggatactattcaacgggtgcatcaattggaggctatggagacagagctcgcgagtgccggggatgaatacgatcgacttccaaacattgaggctattttggaagcttataaatcgggtaaacttgattggtatactggtctcgttacatattggtcgaaggggtcccggatctgtcaaccaagaccatttgactgggatgaatttgaagcgatcagctcccactacgaggatcacaaaggattatggaccgaaggggtaatcgattcattctgttttccaaaggtaactggctgacgaatgatatcagctcaatatttctgagaatgatgtttcctatggagctatcaccgcaggtccatgtcgaatctatacaaagctgactcgggtgagatccatacctattatggctcaaacctcttccaagtatttctgacttttttttatctagttgacattagcactccgccttccaggagtaccgtgatttgccgagttggactttattcacaatactggctgcagtaaaatgtccatctatcaaggagatcttaagatgcttcttggtccttttggcgggactattgggccacaaataccggtcatctgcatgtcaacgtctcaaacttgtaatggccctgtaaccaggcaatttattgaaattgaagtcacaattcttgatcaaggtcgccagagaatgaccgcttggactagaaccacgtgctgtctcaatccaggaagctggaaatacaagagcatcccccgactagatggcccaattgtgcacgatttgttatatgtggcaagcgcacctgataactagctcccgtcgtttacacatctcaaccacgaagtctgaactggacctgccagacctgcccctcgctaccaacccaggacagtactatgggcaatctagaggtcccatgccagtcggaaaatttgccgatacacatggtggttggctaccagaaatgctcggaacgttggaaatgccgccagcagcagctggagttcctccctaagagacttataaacctgtcattccctcgccgactgttgcttgtccttgaacttagtcttgattcatttgttctttttattgcttatagtgtattgctgccccagtttatcacatttctcaattgtttgttgagcatttctgttgttatattttggcgcaaaccaagacagccaataaaatcactgttttgttatgttagttaatataatgtttttatggagtatgatagtgtatgtcccatcaaggaccgacatgccatacttatgttatcaatttccccctcgcactgacgttggtcatatctagatatgccttggaacctcgggtgtagctatagatgccgtaataattgagatagagaaatatgaggcttgtaggctcatttcgcagtccgtttctttcctatatttcaggtgtagagcaatgttaaatgctaacggtgccgatccaaccaacataggcggcccatgcagatcgtacggaacctggcagtctccctttaacccctcttcctctcctttccacctttcctctcttctagtactaatacttctatcataaatcacttccaagaactttgtataagagaaaattggctaacccacgaatggtgtcactcggtaaacaaatataatgatcttattccttattagtgttgtgatgcctcaggccacgatcgacacagggaagtcacaattcatattctcaagatggagcaatctgcgaaccgtgaaatttttgtatccaaccggccccgtgatctgcgccaatacgcttggaactatggagtagccaagctctggctgaattccagggaaaaagataatttgtggtcgcatttagccccacgccgcttcttatgcgctgcgggtcgctggtctagattggagacagcgaggtggcagctatctcgtctttttttcattttgccttctctttttcaactgttaaaaagaaattctcactgtgaatcaaagtgacaaagatagtctcaaataatgtgattctagctacattttcgtgactttcgcaaggtcaatataaattgcggaatactagcgtattgcaactagtggcaattcatcaacacttgcactacagggtccacagttaattaccaccatgggaggtctctgaaacggagagaacaatacctttgtaggaatttttcccgagttccgtttttcaactctgcttctcccaggggcctgaattttcgagctcaagtcaatcatccatcatgaccgtcaaagagaagacaagcgtaaatgacgcggagctgggaagccctggggactctaccgaggagtacgaggtcttcaagaaaaccgaggatggcgtcagcttccgcagtgttggctggttcaaggcgtgcattatcttcgtgaaggtcctctttgcgacgggtgtgctgtcgctgccagcttcactgtactccctcggtgcggtaggtggctcgatcagtatcgtcgcatggggcgcgttcaacacctactctttcgtgattctgggcaacttccgcaagaagcatcctcactgccactccatcgccgatatggcggaagtcgccggtggtttcttcgcgaaagagcttaccggtatactcttcctcatcggctacgtccttgtcacgggcagtggtattatcggagtttcaacggccttgaatgcgctttcgcaccacgctgcgtgcactgtctggtggtctttcattggagcggttgtgatcatcgcgacagcttcggtacgcaaactccagcatgtgggctggctcacatatgcaggattcatttcgatctatgccgccgttctgatcgttgttatcggagtcacaacgcgcgaccggccggctgccgcaccccaggagggcccttacgagctcggctacgtggcaatcaacaaccccggatttgcggctggcatggtcgcttccagtactatcttcgtctctacggctggtaccagcgccttcatcccggtgatgtcggaaatgcgaaacccgaaggactacaagaaggccctatacctgtgcatggttgtggttaatgcgtcgtaccttgctttcagcttggttgtgtatcgttggtgtggacaatgggtggctagtccgtctttgggtgtatgtatcctatcctttgcctgataccggtttcagacaatcagctaatttttgatttttacagagcgctggacagacgatcaagatggtatcttacggtgttgcgctgttaggactggtcgtcagtgccacgatctacttgcatgtgagtatatccctcgcaactcacgcttccggaactgacttcgctacttagatcgccgccaaatacatatttgtgcgtatcttgggtaacacgcgccatctgcaatccaacaccgtcattcattgggttacttggatgagctgtacggtcggtctcggtgctatttccttcatcctcagcgagactatccctatcttcaactacctggttgccctaattgggtccgtttgcttcgcgcctctggccatgtgccttcccggtttcttgtggctacacagcaatggtcattaccgaaagggcacactgatgcagaaggttatctacctgctgcactggggaatggtgctcctcggaattttcttccttgtcggcgcgacgtacggtgttatcattcagatcatcgatgcctacgcaacgggaatgattggtatgttctgctatacccgcaacagtgtagaactgcgactgactttttttattaggctccactttcagctgcttggacaactccagctcgtcgtaggtatgggtctttacagtcgactgcttagggatctgcccccaactggagtggtgatatatacgctcaacatggtatggatggttatacaggaattatataatgagggcccgggaggtcataatgtatgttgtaatgagctgttatggaatcgtaacaaattctgttttcctcgcgaaactctgcaagccaaacgctaatgtaggtactgtctccactaattcccaaatgcggtccctcgtgtggctcacggacgcagttccgcgaccccgggaacctacttctaactacattcggcctgacttttgtctatcaaaactttaattccttccaacgttcccgcttagaatttttttccgtcggacaggagaggctcttgtgccacatcccgaggtcctttcccagctttcatgacacataccattatgtatttcagtgttaccgaggtccggctccatcgcaaatttgtggtatcccgtgtggatccacccgcgttccacgaccttgaagttcctggcccaggatgtggggacaggaatccacgatgccttatcgcagctgctagccgctgttgatcttgaccagctcacggtacgaaggcttcattcccgtcccgcggcgctgataccattgcgggtcttcactccacccttggttcgcgtggaagcgaaggattccgggatcaaatgctcgacttttatcattgagcagaattgggactttactgacttctagaaggctgtgggtaccaagcaggtggatggtgataagaagggtatgtttactaggatggcgacatggttcgaaagcgaggtggacgattgatttttttcagcttaggtatgtgactttgtctgattatcaagaccgattaaactaaagtttgcctaagtttacgccttcgatctttccttttcacacgcggaaaatatatatagccgggataccaggcaaggtcccaacacgatcacgtcaaaacatctttggaactaatagaatggctgggtatcatattggcagacctgcagcggaaataaactcctgcatcaagatgtttcatgaagatggcttgtatataaggacattctcaacaccttgacggtaactagatccctaaacgtacatgtagattcaataacatactgctcgtagtcatatttatgccgactttccctcagcagaatcccgcggttgagacaccgaaagagatcgctgatcgttgccgcctttcgtccgcccaatgccaaccatctgcaagatttcccgccagaagccagtaggggggtcgaggaagctatcctcgtaggcatcgatcaagggtcgttcccagacaaggtcggcttcatgggccttgacgaactttgttttcttgatgattttccagatgatgaagaggggagggatgacgatttgcatggtgtagttcgaccagaaggaagacacggaccaaggcttgtatgaggtgtaaccgtagacgatggtgacgatgatcatccaaacgaatgcaatgtatgcacagtagggttggagtcgtccataataggagagggaccggcggtcaagcccctgcgctttgcaagcgcggtggaagaagatgtacgtcagactgatgacgatgtaattgatgagacctggttatgttgtcagtattgtaatcagtgttgggtagcacggattgcatcgtgatttcttacctccggcggtcaccaggctagcgaaccacgtgatgacgatggacgagctgctagaacactgcaagaaggaaagcatagggaagatcatcacgatcaggaagcaatagacgggtacaccgttgcgcgtagtgtaggtgagcactctcggggctctcccttccagtgctaagccgtagagagtacggatagcgcagtaggtgtaggtattgccagcagagaaaatggaagtcagcaagaggctaaaagattacggtcagttttagttcgtcagattcatgttattttcgatggcactgacgcgttgatgatcgaagggaagattgaaatgcccatgtttcgcatgccaatgacatacggcgatgccgaagcagaaccagaagaaccgcccgtcacgaccgccttgagttgcggatcattagcggcacaaacgatacccacagccaaggcgccgccaataaagaagagaccgaagcgaatgtagactgtcttgaatgcattcttgatataaatgcggggacgctttgcttcagctgcgaccatggagatatactcaggaccgacgacggcaaagcaagccgaccagagagatcccaagaagccttcaaagcgaccaagggcgccggtatccagatattccatgaaagagcctgggttgttccagtggcggaatccataggcatcatgggtcgggtttccaccaaccatggtgatgaaggtgaaaaagaacaaggagaagatcagaatgacctttccaccggacagccaaaattcagcctcgccataggctttgacggccaagacgttaaggcatctttgcgagaatcagtattttgatcagacttgaagtgtgtaaattgccaaaatgggcggaagaggttctcacccgtagaccacgatgacaccagcacagatgcctgcgactggaccaggttcagtaatcttctcactccagaaagacaagacgagcgtgaaagccgagatctcaaaaggaatcaaaagggcctcatagaagctaaaagaagtgttagcaaagacagcaggcaaggtttcggcgaagccgaaagtgggacaaacaaaaagttccagccgaccatgaagccaagagcgtcgtcgacccattttccagccaagcgaatgaaaccaccactgacagggaaggcagtggtcatttcagcgagacagttattcaccatggccaaaaatatacattgaacggtaaaggcaatgaacaagctgccaggtccaccgtggtaaagaccggagccgatgctcacgaaaagtgcggttccgatggagccaccaatggcgatcagttggatttgacgatttccaagatgtcgttgaagattgtcggcattttcagccatcacgccttcttggacatctcgaggaccgccctcggttttgaggcccagtgtttccatcacagtgccgttcgattctttcttttctcctaggatagccatattgctttcattcctgtctgcggtgttaagtgggtgatggacgatacggggtggagaattcgcaagcgggagaaactggatgggctgaggtcgcttattcgtctagattctggggtaagggttctgcaaatgttggggtggatcggcggaaatccgggggtggatctgctacaggatggtgggatgccgggctgtgttgcaagggtctgggatttgatcgcgttgtgggcagtgattttgtcgctttggatgtagaaggtgcaatggcaaggcaaatgtcggagatatcgagttagggtaggatttccgtccagtacggagtttagcggagaaacgttgaaactttcctcaagaaaaggatatttggagaagtaaaaagaaggatgcagtcagaaagcgtgaaatgtaggcagcgaaagacgtctaataaagaaaatcagggccaaaacgtggaagtaaaagaggaaactcaaaaagatcgaggttttccctcgaggtacgattagccctaacgcaacaaccccatgcaagccatctaagccatacagaagccatcccaagccataccaagccattatgacgcgcttcggggggttactttcgatatctcccggcgctgattggctcggaatacatatcgcccccgcacgggctgccacttaacccggatccggacacgagccggggcgtggatctcccctggccttttatcttggactcgactacctaaacagtcttagatggactcctcggcgggttatgtcccccaactcagctatgtattacgctcggcagggtgtcctagtctcggtgtgcacgtgcccccagctaagactgcattttaacctcccggttgcatccaatgtctcaattgatctgagtttggaattgtctaactacggagttatccgtatattctagtcttggcatccttgcgtgactggcttatcgtgtgctcggtccttctcacctgggcagcttcgtctgttacgtaaccttgccagataatcttggaaccttggaaccgttaaccttccaaggaagtgccaagtaatcatgagcctgcaatacaaccccctggacgtaatgtagttcgatctgagtagtcaatcgacagaacttggtcgcatggtggatacgtgcagatgccaaggcacggttcgaatcaggtttcattggtcaacagttttgcctctcctatctcaattcttcttctcgcactgggcatatcatgccgactttctctttgaggcttggaaaagcgtagaaattgttgggaagataacgcatttcccctcatatcagacaatcaaatcagacaatcgaatcagacaatcgaagtatattgctcattggtctgatatccgtgcatctctctctttcctctttggttcttatgttagagaagaaagacggtgtgcttgctgattttcttgccgagtgagcatctttagtacagattgtgtgcctgtacctgcatctagaattcatacccctgatcaatggatgaggtcgtagagcgagactcgatcttgccctagcctgtcacatagtaagtctcaatcgacaattagttagtcgaacaagttttgactcgtaatgtttaattttccaatcactgtgtagtacaaagcaggtactccctcttatacaaaatgtcatacatcgaagtgtacatcaatgtggttccacgctaatgagacaaacctggggattaatttgcagatcacgtggccgatttccggggttgctttgaaattcccttgccacaagaggcttgacgaccaggaacacgggatcacgtgataccgctccttgtcgactcccgaggtcgggggacagaaaaaagtttgcttagagttgactcaccaatgtctccgtgttcgatgttgttgaagcgcgtcgctaggcctccggccaccatgatgtgcagaccggtgagtacagcttcctctcatgatcacccaattcaatctgactcccaaaggttcggccccggtggactccgtccttcggcgtcccaagcaggacaatccatcatcccctacgatcggtctcgagatccctctcttctcgttcgctgagcacgacagccttcacccaggccgaaggcttccactcacagcaagagaatgcttcagtgcctttttctgagactcccaccgagagacgcacgccgcaaaccttgacggagaagatcgtacaacggtatgcggtcggtctccccgaaggaaagctcgttcgcagcggcgactacatcagtcttgcccccgggtattgcatgactcacgacaacacctggcccgtcgccctcaagttcatgtctatgggagcaaccaagatcaaccgcccagagcagattgtcatgactctcgaccacgatgtccagaacacgagcgcagcaaaccttaagaaatacgagcagattgagacttttgctggacaacacggtatcgacttctatcctgcgggccggggtattgggcaccagattatggtcgaagaaggatacgcatggccgggtagtatggcggtggcttcggacagccacagtaaccattatggcggagttggctgtcttggaactgctgttgtgcgtaccgacgctgctagtatttgggcaacgtcgcggacatggtggcaaattccccctgttgcgcgggtgacgtttaccggaacgctaccagtaggcgtcacaggtaaggatgtgattgtcgcgttgtgtggactcttcaatagcgacgtgttgaaccatgcaattgagttcaccggctccgaagagactatggaaagcctccttgtggatagccgcctgacgattgccaatatgacaactgagtggggcgcgctcacgggtctcttccccattgatcagactctgaaacgctggctacgttacaaggctaccgaggcagcgatgtctgaggaccgcacaacccggaatcgtatcacgcacgaaagaatcgacgagttgttcgccaaccccctcacagccgaccctgatgcccaatacgccaaacagctctacctcaatctctctactctctcgccttacgtctctggtcctaattcagtgaagatcgcaacaccactcaacgagctcgttcaaaaggacatcaaaatcaaccgcgcatatatcgtctcctgtacgaactcgcgtgcttcggacctcgcggcagccgctaaggtcttcaaagacgccgccaaggccaaccccggcacgactcccaagattgctgacggtgtcaaactctacatcgcggctgcttccgcgcccgaacaagaggccgcagagtccactggcgactggcaggccctcatcgacgccggtgcgcagccgctgcccgccggatgcggaccttgcattggccttggaacaggtctattggagcccggtgaggtgggcattagtgccagtaatcgtaacttcaagggacggatgggctcgagagatgcgctagcatacttggcgagtcctgaagtcgtggctgcgagcgctctcaacggcgttatctctggccccggctcttacaaggtgcctgagaactggtctggcgtggagcacggattcggaaccggatccgaacctaccaccgagaatgagctcaccaatattctacaacagatggaatctctgatcgatcgggttgagtccgccgcagacgagtccaagcctgccacggagattctgccaggcttccccgaacgcatcagcggcgagatcctcttcctcgatgccgacaatctcgacactgatagcatctaccctggtaaattgacataccaagacaatgtctcgaaggatgatatggccgccgcatgcatgcagaattacgatcccacgttcaagggaatcgccaagccaaatgacatcctcgtcgccggcttcaacttcggttgtggatcctccagagaacaggccgcgaccgccattcttgctaagcagattcccctagtcgtggctggcagtttcggcaacatcttctcccgaaacagtatcaacaacgcgctcatgggccttgaagtcccccgacttgtcgagcgcctccgtgccagcttcgttcagccatcctctggcgacgtcgcgggccgccagctgacgcgccggacaggctggactttaacgtgggacgtgaagcgtagcgtcgttgaagttaaggagggtgagacaggagagacctggacagagcaagtcggcgagctcccagcaaatgtacaggaaatcatcgccgaaggtggactcgaggcctgggtcaagggcaaagttgcggagtcaaagtgaggacttattaaccgggccagacgagaacatactgatgtcctcgccttccaggtaaccaccgccatacttttgtctcttgtatgattttgcatatttacattttgtactatttttctatcatcaggtaccatagagaaggcttgtgactgccataacaagtcgtggacaaaaaagtctttttgcatagaattgatgattgatcgttcttcctccttatcgacgcttaaaatgcaatcacataatgagatcagataaatacatctgttatacagccctttttcagacatgagatgtttgaatagatgagtccatcatcctcaccaacctcatcacggcgcgctagccatcttaaaacaagcaaaagcggcaacagccagtgacactgcgctcagaaatgcatctgtcccaggtccgatactactcgagagaaagtcgtcgtttaccgtatagcgcggtattagattgaacgttgttgcaattgccgaccatcctgaaatcgctggaacaaccaacgtatcggccattccaaagaaatactcgaatggaagttttgaagtcgacgatagggcaaacgtcaaagcgagagagtacaactctagaaggcgataccggcgtccagacccaaagcacggcaatgtcaagagaacgaatcgatagcatgcgtgtgcaaatatccacgatttgctgacggcagtgaagacgaacaagttctcgtgaactctgactgtcttccatccaacgcggtgtcctttttggacgatccaaacgaagagggcaacgcaggtgattttgctgcacattccccgaagggtgccgcctgtgggagtcccgaccatcatgccaatgtttgcgtacaccgcaaaattaacataggtcgtaaaggcggacagaaatttcgtctgcaaagaccgatccgcagcgaggaacgataggacagagccgaggccgaggggaagtaaacacatggttttggtcatttcaccgagagtagccgttgtgttaaatatgaggatagtcgcgctgaccccaaggacgacgagcaaaagcaggcccgggtttcgaacagcacacccataagtgagaatgaggatgatggtaagccatacgttgaatgggatatcaatgtacggttcaaacgccgtaagtagttgtgagaaagccatgagatgagctgcgtagttctatctggagctttgactggagcttccccagctgtcgtgcggcccacgcctagctgtgctctcagtatctagaaacagccagttggattttccaaaacgtgggaacaaattgaacccgagaagagtttactcagaaattggctatgtccgaacgagagatggaaaagaccagcataccgcccaccatcgacttcggagaatcgtttttacgcactacagtcccacaaaactttacacacgcctctacctgttcggtggccgagtcgtattccaacttgcaagattatcgtgctgtcttgtggagcatggtttgtatggtaggcggatttgcccgaggctaaaagttttactatgacagctgtttgaactgtttgttggccaaccactgtttgatatattgtttctaacaccctatattctctttggccagatttgacagatggcaaatgatacgatggatgtaggggaaagcaagaccaagaagcatgggcccgaagttgcaagaatggttgaaagaattgttgcggagcgaagcgaagcatgtataaatcaaaaggtcttatgtacgtgtcacgtggccaagttttctcctagctgaaacaatagcattctaatgttccatcacgtgaccaagtaaggtcacgtggcatttggcaaaatatctccaaacctgccatattaacgcggccaattaggaaacgacttgacaatttcatttgcttgaatctcccagaaaaatgactcagaccgatgcatcctgtgcgaagggaatttacgtcgggttttattttcaatgctgataccaattctgagacaccattgaacacccgcagaaagtacattgaagaagacgccgcgatgaaaccccttagcggagatgaactccactgattcatatcgatttcaaagatctttactgggttctcgatatgaagctctcataacctaatttcaagcacgtgcctagagactattgacaggtggtaatgggtgagaatcagaaaacacggtgcaggatctctaatgttggtactgcagaatcaaaagcaacgtatgacaacctctagagaaatccacaccgatgagaagaaagaatatgtatatgttcctggatgatcgatggacgggagagatacaaagtgacaggagtaagagagaaccagagctatgtaggtgctatgtgtgtgcctatctggtctcaaacaataccgaccatactcatcgaagcggcgggttgtagtgactttaacggggagtgtttacacttggacccagaagggcaaatatgtagaccaagggcagtgtgggataatgatggttaattgagactccttcttaagccatctgcggaagactcaaaagttgacgcgttgcgttaatacacaataccttgatatatcatattgctcctatagcaactaccaaaataaagccctacttagatcagatgtttgaacgagaaagtctacattgatataatatttcgagagagcgatggtgtcgttcagagacagacctactcacagcctcctctcacaagtatcacttcacctcctgaggctctcaacataaccatctgaactaaaagtcagaacctctgcattatcatcgaggtcccttctcaactccagcgctttggcgtaaacaagaaaggcttgttcacgcgaaagaaatactaagacaactgaagttccattcaaaagtacaaatgcagattagaaacttcatgtattattttattggaaaatatgtgccctatttagttatgggtgatatggacctgtgtgaagaactcgatccgggtaaaattggattacatagttggatacgtatagagtcattcctgcgattcgcaacatggaccggtctgatgacgacagtaaattatgatttagcattcaaagtctcgcgtgaccatgttcatattactatttgcgttgtggcaaaatcgtgttattcttttctaaatgtattgatctaggcttgtgtatcatgggagtcaattacaaggcaatgaataaggaaagtctaatctagtgttataccctagttgttgcaatgctggcttccagtagatacatgcatgacagcatcatttgcattggaattctctggttttaggtcttgtcgtatgattttaatatcatttccactcacccgtctaagaattggggctaggcccagctggacactagatgataaaacgaagtataaaatacaattcgttggctgattccggctgacgcaatgtgacccattgtttgggtttgacaatacaacgacattgcttttcaatgtttctgagttcggtttataaataacctaacgacgatatcggtcttctattcagatattcatcgttattcattattatcggtcaagctgttttttgactgatttcgcctactataactctagaaacaaacctgtgattcatcgatttcgtgaaacaaagagccttcaccaccgataacgatcatggcaggaactgggaatacgaaagttgtacatgatatcggaaatttggttgttcattttgaacatctaacgcgcagtgatgtcgccttggtcggagggaagaactcctccattggagaaatgataggcacccttggaggtgaaggaatctctgtaccttctggttttgccacgacgtcgctagcatacaggcgctatatcgatgggaacaaaatccgcgatggaataaccaggctgatcaaggactggcaaacgggaaaagcaaatcttgccgaaaccggcttggcaatacgcaatttgatactccgcggctcttggccacccgatgttgaaacagccatccggagagcctatcacgaactctcggccaaattaggaattgagaacccgagcgttgccgtgcgttcaagcgcgacagcagaagacttgccagatgcgagttttgctggacaacaggattcctatctgaacatctcaggtgaagatcgattgttgaatgcctgtcgccgctgctatgcgtctcttttcaacgaccgcgccatcagctatcgccaagccaaagggtttgatcacatgagcgttgccctctcgattggcatacaacaaatggttcgctccgatgccaacgggtcaggggtcatgttctccatcgataccgaaagtggctttgacaagattgtgctcatcaacgcagcgtggggactaggagagaatatagtacaagggactgtcaatcctgacgaataccaagtgttcaaaccacttctgagagatgagaaccttttgccgatcatagagaaaaaatgcggggacaaggcaatgaaaatggtctacggggaagatgtaccgacgcggaatatacctacgtcaaaggcggagcgcgctgcttttgtgcttggcgatcaggaaattcttcagttgagccgctgggcatgcaccattgaaaagcactatggctgtccaatggacatagaatgggcaaaagatggcatcacgggcgaattgttcatcgtccaggcccgcccagaaaccgttcaatcgcgtcgtgacgctggtgtcttcacgactttccaggtaggaaagagaggccgcattcttacgaagggactttcagttggagacgcggcagtatctggccgtctctgtctcattgaaaagtctgaagacattgacaacttcgtcgacggctcgatcatggtgactaaatcgaccgacccggattgggtgcctctaatgaagcgggccacggctatcatcaccgaccatggtggccgtacttcacatgccgccattgtaagtcgcgagctcggcctcccagccgtggtgggcacaggaaatggaacatacgttttacacacaggccaagacgtaactgtttcctgtgccgagggtgacgaaggcttcgtctacgagggtaccagcgaaatttccacccaaacagtggacctagccggcctcccagcagttgatacggatattatgatcaatctcgctaacccagcggcggcttaccgctggtggcgacttccgaccgatggcatcggccttgctcgcatggagtttgtcgtaaccaattatattcgaattcatccgatggcgctcgtccactttgatcagttaaaggacgacaaatccaaggaagaaatcgcgcgattgacagctgggtacagtaacaagcctgaatacttcgtcgacaagttatcgcacggttttgcggccctttgtgccacggtataccccaagccggccattctccgtatgagtgacttcaagacaaacgagtatgctggcctcatcggcggttctcagtttgagccgaaagaggagaacccaatgcttggcttccgcggggcctcacgctactattcaccgctgtacaaagaggggttcgagcttgaatgtcgcgccatcaagaggctgcgcgaggagatgggcttcgcaaatgtcattgttatgatccctttctgccggacaattagcgaggcaaaagaagtactaaaaactatgtccgagaacgggcttaaacgtggtgacaagggtctccaagtatacgtcatgtgcgagataccttccaacgtcatcatggccaatgaattctctgagtacttcgatgggttctcaatcggttcaaacgatctgacacaactgacgctcggtgtcgaccgcgactctggtgagctggcaggcctcttcaatgagcaagacgaggctgtcaagtggatgattgctcgggtaatcatagttgctcgcaaggcgggtcgtaagattggcatttgcgggcaggccccaagcgatcatccggaattcgccaagttcctagtggaagccggtatcaactcgatctcggtcagccctgacagctttgtccaagtgaaaagacaagttcttgagagtgagaggaaacgacttgatttgatagcggacgaacatatcatgctttaatattaaagggatatcttttcggcgagatttttttcaaaacaagtcaaaagttcaaatccattttgtatcctagctttgtacctccttactcctccgtccacacactaagatgtcttcataaaatttttgtttcaaatgagatctcaccttgatgaccatggttgcgacgctttgaattttttttcacgcttattgattctcacggactctcttgagtgtatcgcttagaatctccaccgagtcgcgtatatcagccttctcgttactatttgttgccatttcaacagtccttatgattccgcttcttccaagggccgcgggcaagctgaaacagcaaccccactctggttggaaatggctaataggatagacatctcgtttgtccattaggatcgaagagcagattctggacagggcggagccaattccaaaagatactgttcctttcgcttggataatcctttgggatctgtgtttacactcgttggcaagatctttcgggttgaaagtgttgctgggcagcgctttgtcaatggggaccccgcaaagtgttgccgtcgaccatgcaacaacctctgactccccgtgcactcccaatacctgaagatctattgcatttgcggcgacctagattccaattagccttgccttgaaagaaattgtcgaaccataagaacatactccggctttgtctgctaacattccgcgaagccttactgaatcaagaaaggttcccgagcccagcacctgagaggctggtagtccggaatgctcttgagcgaaggaggtgataaggtcgacggggtgtgccacgatcagtaagattgtgtctgatctgaatggcttcattgcgttggtgatgctctgaataatggcgaccttctggtacatgtgctggatcgtagtttcgcctgctgaataattagaaaaaatcttcttcgtatcgtatctcctacctctgtaagactttgatccggcggtgatgaccacaacatcgcattggcctgcttcatggtgtgtggctgctcggacgcgggttccgctattgcaactgtagcttacatcggagaggtcccgtacctggccgtctctcaagtcgggtttggtatcgaccaagagcagctcaccagcggtggaatttaggattagcgcgtaagcaagagcggcgccaacctggcccacaccgattattgcaatccgagtaatcgcgtttgaatctctagagagcatattgcggacctaagtagagcatacgacccctgtggtgatctgaagattgttaagaggcgcttggattgtgtaagagaagtggaattccgtttcttgcgggatgatactggtttatgtggtaacgccggtaggttggagctttgttccaaaacttgtctatgatatcatcagtttactatccagttcgtagctagcgggcgaacttagattgctaaagattcagaccgagggttaacctcagagtaccaaatttgctaggagtacatcgcttgatggttagctttactataacgggaatgaggaagctataatcgtctagccccgtctgcgtctactaaccacaagaccttaaaatcagaaaatgctatttctctaccatacaaatagtgccttcatccttgcatccaggtgtagcgaaagatcgagtcaaagaaaacatatgagcaggaaatttaatgaaatactcaaaggtataaagtatagatagagtgatgggaacagctgttgagggataatacattgttacgtaggtggaccttaccgatcaccaatcatcgaccaaagatttaggaaactatgtagagttagggaacgaatttcttacgtcataatgtgatgacaaactgtacatggatatctccaatggaatcagttcattgattgaggaaagatgagaacggtcgaaggctcccaaaggtctatatcatcgtgacgcggtatattgcaatgctctgaaaacggtttaaatgctagatagtagagagtgtctaattgattaaatgcgaccaatatttattactagttatagcgtaattatacgaaggagttaggacctagggtgaaaactatagattatgtagcgaaatgccgcataaacccaaaatcaaatttggggattgttaacgcgacacccctgcctgatttttcagtattcaatcttactaatcaagcatcgatttaattttgccggacttaattctggactttggaattttggtttacatagtaaaaaacatgcattttgatgagaagaaaatttcattgcaatagattgttacttaattttgttaagggtttacatacaaattgtacagtggcgttgcatgagtatttgcaccccggtacctctaccattgaccgctctgtgaataccgcctgcctattcctattattataggagccacccgcatagtgcgactggctgggagtgagtacgaagtttttccggcagaaaatagggcccccccccgaagtactagggtgcaaatactcatgaaacatgactgtatgtgttctgggctgcgcagctcggccgggaattacgttaccctaaattaggcggccattgcgtagccaccctttaaccaagtaaacaatcaaccaattaaataattaaataattaaaccgcggtatagccactatgccggcgtaagtacctattgtacatgaggtttgataggaaggcggtaagaaaggcgggcaatggtggcccgaaaagtcaggcaggggtgtcgcgttaacaacccccttaaatttcagacgaaaccgattaagcaaaccaattgatcagacaaatttgcgtatttacgggtagatcagacgaactggtaaggcaatcttctagcttcatgttttttattagaatataaccagactaaataagcgattaaaaaccgcacgatcaagggagctttgtgttctggctcccgcttgcagcacattctagtcggtaaattaacccgacgaaacaaacaccttcatctgcttcttggttgctttcagcaagacagctaaaaaaatcaagattgaaactcgtcaatcagatcctgcacaatctcacatctcgaggtctttgcaatgaccttggggagcggccatgacctatccgaccgttagtacatttgagaatgatcgttctaacggacctcggtgctacgacacccaccaccggtaatattagtgtatacatgtacgcaatttgaataaatgagattaacgttgtgctccggattcaagaccgggatcaagttctcgttgtttgcaacaatgtccaacgcaagggcccgctgttttcaacgggagaatgcgaggaatgcgaggattgtgtggcttagcaactatcaaggagttcagcacggtctgtttataatgctgcagggaggcattttctggacacgtttttttttggagaaagtctttcgcttcaatatcgggttcatactccaaccaactccacaaaatgacacacacgaagtccctgttcctgactttgatgggtgctgctgctctgagtcaggcagctaaagttcattatgatcttgacctcacatggaagaggggcgcaccgaacggagtcgagagggagatgatctttgtcaatgatcgttttccaggcccgccattgattctggatgaaggagatgaagtcacagtgggttgtcctgctttattttcaaagcgcatactgagagaaatagatagacgtgaccaacaatttgcccttcaatacatctgtccatttccacggcattgagtagggcctccggaaattcctcttcgattaccgcacaatactgaaccacaacaggcaaaccaacaccccatgggcggacggagtatcaggactatcgcaatgggccatcaagcccggtgacaaataccgataccattggaaagccacgacctatggtacttactggtaccatgcccacgacaaggacagaataatggatggtctctacggtggaattagaattcggtgagtatgcagcagcatgtatttattatgtctctaacaaggaatcagtccgtctgccgaccgagagtcaccattctcaatgatttctgatgaccctgccgatatccaggcaatgacaaaagccgcccatgatgcccagttggtcgtgatgtctgactgggaccatctttcgtccaatgaatacatggatgcactgaaagaaacaggctatgatatcttgtaaggacccaaatatgatagccaaagaagtaccgcactcacaatcaccagttgctcagatagcattctcatcgatggtgcaggctctgtatactgcaaagaccctgaatatttgacaaacctccaaccaccccaggtcagagcagtcataactgagcctttgacggataaggggtgagtctatactttactaggctgatttgaaagccactaacacttgccagatgcgatcccttcatgccagttctccaaggtaactgggagcaccacccagagctccttcccgagggattgaactccggatgtaagcccagtgagggtccaacgtcctcctttgaagtatcacccaaaaaccgatgggctagtttgaacttcatcagtgcagcaagtctcaaatcgttgatcttctccattgatgagcacccgatgtacatctacgaagtggatggacgctacattgagccccagcttgcgcatcaggtttccatttacagtggagagcgctactctgccatgatcaaactcgacaaggaacccggcagctacacgatccgtgtcgctggtcatgataaccaggtcatctctggctacgctaacctcgcctacaagggcggtgaacataacaagcgcgaatcaacggcatatatcgactacggtggcactaacactacagcctctgtgatcaatctgaacacaacgaacctgccgccatatcctgctatcctacctgcggaggacggcgatgatttccatctcctgacccttggacggatcaactcatcctgggaatggactttggatgggacgaccttcctcccagccaatttgaaccaaatggaaccagtgattctcaaccccaaagcaccgagcctggattctgccctgaagattgagacccggaatggcacctgggtcgatattgtgttccagctcgccatccccgacccaaccaagcttcagccaccccacccgatgcacaagcattccaacaaggcctttttgattggcagtgcaatgggcaagttccagtggggctctatcgcggaagcaaaagcaagcagcccggacagcttcttcaaaacccctgtgtatcgcgatacatttgtgactgcgccaaatggagtggcctggatcgctattcgctaccaagtcgtgaacccaggaccattccttttgcattgtcatatggagacgcacttctcgtcgggtatgggcatggtcttgctggatggtgtcgatgcttggcccgaagttcctcctcactacctatagtgtgttctatgatttttctatcctgtctttgatgtatgcgattttatctttctaattggctccttaataataatcatctgccaacgttcaacctgctactaaaataccactgacgtcattgtttgtttatggaacgggctctcgacctacatatcggtgaatatgagtttaggccaaagacggtagtgggactggcatcatcatcggactcgtagtcatgggtaacgcctaagctccagaaacttggccacgtgacctcatctggtcacctgactatgcatcaaacgggagaaaacttggccacgtgacacgtacttctagtttgcctatacttgcttcgcttcgctccgcaattaaagcagtggaaacttctagggtagggggtgcaattaccgtaatttacggagactcataggaggaacatggataggttgaagtcgagcggaaagatatcttaatctggactattgcatttggagtaggggtaaaactgatttcgaatatcactgtaatccttttgatgactgtaattaggtagcttgtgagctcactaataactggcgtcctaagatgaccgacgttctggttgattctattacaatgtaaactattagcctcttcctcaaagtccgtgcgacaactctctacaaggagacttccacaataggacccttgtagacgtgccgggcgcgcacgacatagtatataattgcgaggaagacgctgcctcctatcgccagaatgctccagttcatcgtctccactgtcgggtccattgtacttggccagaagctgaaaaagatgacgatgctgatgtagatgatcgcatacccgttgatcagggtaccaatgatgccggggcagtggaacggtccccagacaagcttcgcaccgggaacattgacaatatcatcctcgttgtcgttatatcgggagatgtcaccacggatgcggcggtaaaagagcaaaacagaaaccattaagtaagaaaggtatatacccgaaactgccatggacactatgtcctccatagcggtatcggaaccaatgttaatcagggaaagcaacacagcgacggtcactgtcaataggatggcgaaaatgggcaactgtttcgtggaagaaaccttgaatagcagaatgttagtccatacaagacttctgatgatagctaagtgcttacctggctccaccatcgccacccggggactcccctgtctcgagaaaaagaccaaagctgccgagacgccgcagcaagtaggcccatgagagaacagacataaatggtgataacgatagcacacatggccaatgaaccaggcaccgagtttgttgcttccatgaagatgcccatgaagttatacccagtggcgctccccagcttaccaccgaggtcagagtcggtgcagaacatcataacaattatcataccaaagccgaggcagccattgataccgacactaatcataagggcgttgggaataacggtcgaggcatttgcgacctcttcggacatctatttggaggtttattagctagagacgtggaagcataactcccaaagaaacttacatgcacggcggcatcacctccagcgaaggcaaaggcacagctggtcataccaacaaaccaggatagtccttgcgtggcgaagcctcctccattttggaaagatagaaaaacctgctcctttgtgttatgatccgccatatagatgagggggattatgatgccgaagaacccaagaatgtgcacaaccaaaatgatcacctcgatgcggggcagcaagttgccggggagcaagttcacgaccaatgcgagactgagcgaagcccaaacaatcaatgttccttcccagggaagagcattgtagaggttatttcctaggatcgcggcaccctggatcatctttcctgtcaaaaaggcacaggcggcgaaggcactctgccagccgagaacagcaaaccatcctatgggcacaagtgtcagcgataatgaatagtttcggtccgagtatgaggtagaagtttacctgtaataaaacttaggaatttctggtgactgcccggggcaagcatggcagcccagtggtattggcctcctgcggtaggtgccctgtttgacaattaggtccgaatttagccgtaaatcaacgaataatgcaacatacatggaggccaattccgacaagaccatgaaattggcgaaacagccaacccacccgaagatgtaggcatagatcgcaccgccggagccaccgctgatatatgttagaaaatgttgcaaggcagcaggttgttgtcgggtgaacacactttgtcagagggccagtaaaagtactggagaccgatcagcgatgtattcagtgaaaatttacaattgaactggctcacccaagcagaccttcccaagttcccagaatagtacagctgaagccaaggatcgacagaataccgaattttcgctagtcggaagtgtcagtagtatggtcaggtgagttaccttgaagcctgtatttcataccttaaggactggcctctttcccatccgctggagatgcgcattatcacgatccacctgcccctcgcccctgctggtgacggaagtattgctcttcaattcataggccaccatggcttttttgtagaggaatggaatggagacaagtgggaagtgaacagaaagttaaatataagatgcagctgggttgaaagtacaaaaacaggcaaggaaatgtccatcgcccaagtatcggaatgcgggtggacgagtatccgatttgactagatgggtgtacgttacatcgactagaactgaaagtacgtgagtggatgacgctaatgtatgattgttttgatttgattgcgggcgctctgcgctctgcgcttcgccccaaggagggctagggcccatcgtgttctatgtgtcgatcgtgtggatcacacgcgggaatgattccccaggaagcgcagcatacccaattgaatacgccacagtcaatcatgtggggcatatatcggtgattgctacccatagggcaacagtcaattgatgcttgtatgaaactgataagggcagatatgaccatactcggccctaaaaaggtaccttgattttgttgtggtctagtagtaaaatggctgtatcatattccacgggttgacctaatgcgaggggccgggggccagaactcaggggtgaatccttcgagtacagggggttgaacgtgataagtgtgctggatattaccatatcgttttacaataattagtcactgtgagaataaacactgatcagtgtcaaagtagggaaaatgtaatgtagaaatcagagcaaacacatatagaacacatatagaacacaatgcatatatagagatcgatggactggaaacacaagattggaagccctagaggaactataacatctctttgaagatcttcatatgcatagtatattagactgataggtactggaatgggattcgcatcctagtcgcttttttctgggcactatacggagtaccagacgatataataaaaagcacaaggcatgttttctcttcagcatgatgatctctaatactctcatccttcttctttcttcttaagtaatccaccattcttcacatatttcggctcaatggggacacgattcaaaggtgacactaaagatccagcggtcaatgtcactacatgggttctcttagtcataatcatttttagtgtctctgctcgacttggaactaaagttcgactgttcaagagactcagcacggatgacctcttgatcattgcatctctgattgtcggtatcggtcagaatatcgctgtttcactggcagttgggtccggttatggaaagcattccaaagatgtctccagcgccaatatgcaacaggtgatgaaagtacgtatcttccgccaccttgtgatttttcacttctttggaacagattttaatgtgcttgttgccaggatcttttcgctgtctctcttctgtacctcctaagcctcatgttctcgaaactatctctggtcgtgtttatccggagtcttacaccatccgccaaagataaatggctcgcccgaggtgtggaggctatcgtgtatgtctgggcagttgttgctatctttggaactgcattccaatgctctctgccccgcgcctgggacttccagaacggccaatgcattaacctggtaggtagtgtctccttttgtccctattacctcctatcccccgaagccggacaatactaacgcgaaacgacgggtgtccagttaacttggcgctacttcgtcgctatctccaatatcgttaccgacctcttgattgtcgctcaggcaatgatcctaatttctagcgtccaaacgacgctgttgcgacgcctggcttttgcgggtatcttcctgcctcgacttctgtgagcgacccggctctacggagtgctctctcttgaactcgaaactcatctccctccgtcgatagtgtaacgatcgcaacggtcggcgagcttgcctttatcaaaaaaggcactgaatccaacgacccaacgtttcagatgtgtgaaatcactattttcgaagtggccattcagtgtctcagcatcgtgacggcctgttggggacaactgagcccgttcctgtcctggatgcgatctaacgggctcaagctcaatggtgtggaagacccaacctcgtggagctataagatacgctcacaatcccaggggcggtccaagtcgcgagaccgtaagatcaggtctgaaagccacgaacttccccctttgctgatacgacgagatcagattttggtcacacaggattgggagctcgacagccagtcaagtcaggcgcatatagtaactgagttcgacacacaatcctaggctagcaacggtggcaagtgccaagcggttccctaatcaacttagctaatgactataaattcatcatgggcgcgacatgcatagactttggtaatccccaaatcacatggaaattacgtgctggaattaaatcggaaaataatcagaataatgagcacatgccgcgtaatgatggctcccgttatagagacgcgcatactatatgtagtgtgctttttcaccttccaaacgaaccttagggacggatctggttccattcgcaatcgcgatcgagccatcgtatgatgggagatggggctgtcgcgggccaacgcataaaattctatactaccggacccaacgcacggcccgaaaccccgattggggtgttggggccgcaccctgtagaacagtacttttgtgtaggatgcttaaacctcaaaggggttagtggagaaagcgcagggcggagtgctggccaacgcagtagctaggtttctctttcgttcaggcgtgcaggaaacccttgcaactagctgtcttatcggctcgcacctcttccctccccgctcctcgaaccccttgaaacgtatctcaacgtcccgacgaccattatgcgggttttattgtcacttgggggccatattcctttctttgtcaattgtattaaacaggtctactgtcacgatctgcatgatttacctatcatatcacgtaatgctaattagagctggtttgataactattttttttttgctagtttagtagttttagcgagaggttggttgatatatctaccctccgaagtagattcttacgtcttgctcttttcttccccatcacggaatatattattttgaactaagttactctttacaaacttggctcggcacacctaccctagtgcaaacgttttagtcaccgccctttcgctagacatttgaacacatatccagccggatttcaatatggggtcggcaaccaatcctctcgtgctagaactagcgacaccagaagatgtccctgccatcactgagctatggtttgctgcctttacgcagccagtgattgggaaacttttccccaacactcccggtatgcaccaatggcaccgggattggcacttgggggacattcagaagtcccactacagatacctccgagtagtggacacccagtcaagagatgaaaaaggccgaccgcggctagttgcctttgccaaatgggacctagccatgccaaatgagcgaggtcgtcgctttccgcattggcatgaggactcgccttaccaggaatgcgaggatttcattgcagaactggagcaggcgagggagaacgtcatgggcgatgagaaacattactgtatgaatgatatccctttaaggttcacaaaggaagaaatgatcactgacatccgaaaccgaaaaagacctcgatacccttggcactcatcctgattatcaacggcgcggagctggctctatgcttgtcaagtggggctgcgacctggcagataaggatggcgttatggcatacgtggatgccagcaaggagggagcatttctataccagaaacataactttgtggatttcagtccgcctggttcggaagtggcttcgatggctcgccgccatcaggtggttccgagcgatcacacttgacttacgaactctgagtccatgctgcgagatatctcattgaagataaagccataaacacatttgaactcactggttcggattgtagctcatttattgttatgtttctgtctagcaagtatatatatattttatgcctttccccgccttttttgctgtctacctagcaagaacaagataccttaacagaagggctactcacacactatttttcgctagtaacacacatccactagctctcaaccagcttgtgtaaattactgtggtatcctgcctatcacatgacttacgaccgtactatgaaacaggatcaggtgatattacttcacgtgatttcaagttgtggagccgcaaaccttaaatgagcgcatccatgggtgagtcccaagtcccggatagagctgagatcgaaacatttggtataactccggggcttgatgacagcgttatatttgatcacccaatcgtctattatggcagaccatcatctcttgttgaaacctttacataattaggagagaatgttgatatttttgttccaaatataaaatatttctgaagcgtcattttcacttgatttctattctactctgcgctaaactatatgttgaagcggtaaatccacaatgcgtagtctgacaaagcagacaagacaaataataccagccttccaagtaggtcagctggcaagtataggagaccatgggacctgcatttctcaaaacattattctcgttcagtttgtgggtgatgatacttctatgagtgtggtaaaactggaaatacggtcttaaaaacagggcaactacatcatcatcccgattttcttactacaatgtatacaatgttttaggtatctcatactcattacgtgctacgaaagaggttagagccagattgaggtaaaaataggcttttgtactcgtttcaaccctgctttctataaatataagaaaagcccgcatattattgataaaaagaagaatcgtgtcccaatctatagcaagagctgttagcacttccagacaagcccattgcatcaacaaaagaaaaatgcagcaaatataaggaatctctaatatctgtgtatattttcggtaaatggtagatctagattttagtacacgcagagaatctgacctatatcgggttagagtcttgaacctcaggttggagaaaagttattaccgattgaccatatagaagaggaatttcacccgggtgtgacgtgctagatgtgagagtgtatcgattcaaaataaggaataggtagggagaaatagagatagagcaggtgcagaagttggagaaggcctgcttgtatagctggccacttctgtaaacatgtaagcattgaagagaaaaccctggagcggggacaggggcaccgacagccttgcctgcgaaacaggtgcgagagaaaagccgtcactgggagtactagggtgctagagaggagattcaggagaataccatggggtgactactgagaggagaagtgaaaagttgtctgcattgctatctatgcctcgggagtgcttttatagttagttaatgcagtagttagttgggttaagaaacagatggacgaggcaaattaatcccaaatatatgttatattactgagcgaagcgaggaaacctgttattatatatgtctcatcaactagtaaacaagcacatacgaccatagggtgtggaaaacagggcttcccgtccgctcagccgtacttaagcnnnnnnnnnnnnnnnnnnnnnnnnnnnnnnnnnnnnnnnnnnnnnnnnnnnnnnnnnnnnnnnnnnnnnnnnnnnnnnnnnnnnnnnnnnnnnnnnnnnnnnnnnnnnnnnnnnnnnnnnnnnnnnnnnnnnnnnnnnnnnnnnnnnnnnnnnnnnnnnnnnnnnnnnnnnnnnnnnnnnnnnnnnnnnnnnnnnnnnnnnnnnnnnnnnnnnnnnnncgccggtgagttagtagttgggtgggtgaccaccagcgaatcctcactgttgtatgttttttgttcacgcattcttttctattcgttcagaagctccctctttttctgatgttagatatccgcaggtcggagagcatgggaaaatatgtgacaccaggatgagtcgttcacctggtggacctcaatttcaaggacggtcttccgtcatctcccaaactaagttgatttctactagatacgtctctatcctcttcacccaacatggatataacctggtctcaactgggacacagcttccacggtcaacaagaactcaagatgcaagctacggaaaagccgactcaatcaggaattgacttgaccctacctgaagagaaaactcaagatgcagggggtgctgtggccgcagctgcgaatgttgcgttaatcgcaagattgataagacacggcagcttggaactggactttctacggtggtatgtggatgttgtcaccaagctcggggttttgagcttactaaaaaagaaaagatgggattccttacaaattttcatgtcgtggacgacggcagtggctaccgccgaaggatcaatcgagcttcaatatggggattatctcttgatggtcatgacagtccttttgatgtgattgtgatgcctccaggatgcgagaaggttgttccaaagagcagctgataaaaggcaaggctgaacaagtcgatgaaacgtttattcttattggcgaagaggagaaggagaaacttggcgaggtgcctgcctggtctccatgatttctttgcaaactctttcttttgtctgtgaatgctcttgctttggtggtcacgggccgatcacatgccgttacctggtttgtcaggcttcacctagctatttagctaattaactagttctcgatcattgtaaagaatctatccttcttcatctctctctcgccgctacaagagctctgatctaaactggcagttacccccgaggtttaacctctgtatgttttcttcctattcaggaacagtcgttcctgctattctagttcacggctcacgtgcaccttgctacctgtcagagcacttttagattctgtaagcttccccatcagcatcactcgatagattcataaaaaaagagccatctgagatcgtaagtctccctcgcagtctttccagcagtctttccagcagtctttccaccagtccttttgaggggttcgttttgctaacgtctatctaagatgtcttttgcctctactgcccctgtcactgagccctgcgcgtcctccactatccttgcccttcaagaggcaataaccgaagtcctgttggccctttccccacacgaaaccatatggtttttatggcagatgctcggcctatatatatgtctgttgtttgcatggagggttgatcaacttcttgagaatatgattgaccagtatgtctcattttttatggagctctgtgaagtcggatacttacagaatttacagttatatagaatttacagttattgtccacctcggaacgctgtagcacgccgagcactgtgatgtagagttctagagagcaggcagtgtagacggatcatcacccctgaaatgagaaatgagttgcgagatacttctgcactaggagattgtatactatggtgtggtctatgtgatacctatgcttgctagccggccgtcctggatggttggtgttgttgtgtcgctctcgtcttgccctgcttggtcaggctgcccatcgtgcatatccctcttcgttataaagattgatttcttattgaaatttggtagaaaggcaagaactccttgtatttttttaaacccattttattcggattcatcaatccgatagactagcttagaggctcggactttaccttcccgtaatatctgaataccagccaacgcaccggccaagctgcctgacttaatctgatatggatggggttgaatgcggcggccctcgagtaggttctgcgctgtatcccaccatttgatgccgaattcaaggttagcactatcaggggatatctcggtcgttcccatgcgataggcttcccccaggatgtcgtacgccattgagacatgcgagtcaacgtcttctctcgcggatgaaacatctagcagggcgttataggaaccgcccgccgacgaaatggcagcgctgcagatggcagcagattggggcgtcgagattgtatcaaaaacgaattccagggcatcatcagtatcctctcggatctgctctcccaccagtggatcgtggtaatcaaaaactgcgtctgccccaagctcaaacatgaagctgcgattggcttcagagcatgttgtgacaactcgcagtcccgatagttttgccaattggatcgcgagtgtaccggtagcagttgcccctccatagattaggatatttgtgtcgtctgactcgctcgactgattcccggggaaaggcaattccatgctctgataaagattttgaccaacagttgtcaaacccacaccaaaggtagctgctgcctcaaagctcatggactcaggtatcaacatttggagatcgcccttcgcaataatatactgagcaaatgcgccgccattgtggcgaacggcattgctaccgtgtacaaagccagcaactcgatcgccctttttgaaaggctttttgacgagcggccccacggcttctactattccggaatagtcacagcccaccgtggccccggtacagggtacaaaatcaatatgacgccagtccgttggattcaaagcgacttcgtacttgttagttcaactattcatcaagcacgggagcgaagaagggcacaaggagaaaataccggcttttgttttgacgagaatgtaattatccggcagcctagggagtgggacatctaccagcgttgcgcgaccaggttcttggacgacaatggcgctttgggtggtcattctcaacagatgtcgcgatgcgagggaaaatgaggggtgcgagagaggtgggggtatggctctaatttctttagataaattgaccaaatggcattgggggttgcaaaaggggtgtatactattgcactccgtgcgcaattctccgtacgcggcctggaattactccgtagagttgtccatgattccgggcgagattgaactattggagatctcagacaaagtacggtttgccgcgcgataatctatctggctactgcgtgtagcttccaggatcgtcgaaatacggagtattgtaagtgatctgcgtggaggggaggggcaagcaagtgttagtagcttcaataaagtcaattaatccattactattgtcgaatgtgctccgcagcctagaagatctcatcgtgatattgagaccgggtagcgcgggcgatgccagtaaatggtccctcagttaccacagcccaaacatcaccgacgcgagattagactcaatgataatagcccaatggatagccctcgatatagtgcaacaggcaatattgagattctccaaaatacatccatgtcctccgtacggagtgcggagcaagggaatcgcaagtacccggggagtccgaaaagtggaacttgtcgcaaatagggggctgggaaaagaaagtcgttgctccactacgggatgggaatcccctcatgagaaaaatcataagaagaaattctgataggcgatcttcggctacaaacattggcttggtgcagcttagcacagcttagtgtcataatatagtggagcatggaacatttggcaatcgtgaaatacaatgaccgatactggtaatggcttgtcacagtataatttataacgtatgtctggtctatcttaagggatggacgatccagttcgttgatctatggagtagacaatctccacttggcagcattttcgtaatcttggcctcattggcatccgagcagattccaacctgcagaatatcatggaactgggtatagaatcagagctgaacaagcatggagaataagatcccacagcattagccatatctattgttccggacttgtttctagcgtaggaaacataatcttaccaagccaaactccaacggatgtgcagaatacggagtagattgaatgcacgaggtgcatcgtccgtttttctatgagtctccactgcatgttctccgatagccagtaaaatatgcatgaatatacaaatttacgcattaatggcattagcgccgagagccagtttcatggcaatcagaagaatgcaaaacattgagtataataacccacagcatcccttcttattcttgtccacgctcgtcctcgattaattttataccccgaagatgcctagtctaccagcaacgacttctgtacctacagatatggagggaattgcagtcattggaatggggtgtcgcttctctggaggagcgacctccgttgagaacttctggcagatgctatgcgacggacgtactgggcatgggacagttcccacaagccgataccaagcttcggcctggcatcaccctagccatgaacgcaaaggagcggtatgaatacctcaattagatgttagtttactattctaacaggatgaatagatcaatcatgatagtgggtttttcttgcaggaagatccatcacggtttgacgctccttttttctctatcactgccaaagaggcggcgggcatggacccagcacaacgtttgttgctcgaagttgcatacgaaacattcgaaaacagtaagttgagtgattttcacgtttccggaaagaagtcagctaatagggaaaaataggcgggataccgatagacacgcttccaggcagtaacacggcagtgtactctggttcaatgaccaatgactatgagctattgtcaacaagagatatctatgatatgcctcacaactcggctactggtaatggaaggactatgctggcaaatcggttgtcatggttctttgatcttcaaggcccaagtatcatgatggatactgcgtgttcttcaagtttgactgcgatccacctagcagctcaatccttgcggtctggagagtgcggaatggtgagcactgcaatctgatgtctattgatcacacagactaaacatgcttgtgacaggccttggtgactggtgccagtcttatcttgcaccctaattttacacaaagactgtcctacatgcacatgatgagtgcagatggcataagtcattcatttgatgagtctgcaaatggatatggtcggggtgagggcatcggtgctgtgcttttgaagcccctcagcgccgcattagccgatggagataatattcgagccgtcatccgcggcacaggaattaatcaggatggccggactcctgggattacactgcccagtccaacgtcccaagccaacttgattcgttcggtttatgaacgtcatggcatctcaatgagagacacttcctactttgaagcacatggcactggaactcctgtcggggtaagcaaaatagctccattgatggataaaaagccatcgtttgattaactcaatgatgaataggatcccatagagctgtctgctgtcggaatgactttgggccaggcacgaacaccgactgatgagccaatatacgtaggctcagtgaagacaaatttcggtcacaccgaaggagccgcaggagtggctagcttgatcaaagtcgtgctgtgtttagaaaagggcacattggtgccaaacgccgggttccaaaacatcaatcccaagatccggctcgatgattggcgtttacgcctaagcgacaaaacaatgccctggccagaccatcttccgcagcgggctagtatcaactcatttggattcggtggatcaaatgcgcatttgattctcgaaagtgccaaagaagccctgggcaatgctaaagaccaggagccggcccctcatgtggtggtgttttctacatttgaccaagctggtatcgaacggaccggtcaaaattggagcacatttcttcaacgtcaacaaaaagccgagcgggaggcttcactcaaagatttagcccatacgatgttgacacgccgatcgcagttaggcttccgtagcttcgcagttgctaactcacaagaccagctgcagagcatcttggataaaggattgcccaaatttccccgagctagtcgcaaagctcaaacaagacttgcttttgtgttcacgggtcagggtggccaatgggctggaatgggccgggagcttttgaggattcccactttcagggaaagtatagcacgatcacaggaaattctttcgtccctgggatgtccctttgatatggtggaggagataaaggcggaggcaaaagacagtcagataaaccgacctgatcgcagccagcctatcacctgcgcattgcagattgctttggttgatcttctggccagttggtcggtttttcccaacgcagtggttggccactccagcggtgaaattggtatgcaaatctccgttattctcgcttcaaacaagcatccaatgatgaataaaagctgacttatttgcaacacgtagctgctggatatgccgctgggtatctttctcgtgaagacgctatgcgagtcgcatggttccgcggtttcttttcgcagcagattgcccagagtgacagacgaggtggtatgctcgctactggtatttctgcggctgacgcaaagaagtacctcgaggagctgcctgcacgttcagttgtggttgcctgtgtcaatagtcctgccagtacaaccctctcgggtgatgtggaattcattgatcagcttgaagcaagattacaacaggatggtcactttgcccggaagctgcgcattgatacagcttatcattcccctcacatggaagatctagttaaagtggtaggtagtgctatcgattgtatcaagcctgaggatcgatacaatggctcaattcccatgctttcatcggtcacaaaagagcgtgtctatcccgccgaacttggtggatcatactgggtacgcaacatggtcagctcggttgagtttactgccgcagtgtcacaactcgcaaacctgagcgagtctatcaagtctcgccgacggccggttccaataaaatggaccgctttgattgaaatcggtccacacgccgttttaaaaggacctgtcactcaaatcctgcagtctgtcaacgcaaatatggcatcattgccgtactattcgttggtttcacggaaccagcatgctttgcgaacagcattggaagttgctggctcgctttggagcacaggacacacaatagaccttgctgcggtcaacagcagtgtcgataatacaagcccaaaaatgattccagatttgccttcttatccttggaatcaccaaacgtccttctggcacgagccattagagacagcgcagttgagacaacgtcagcatccacgtcatgatattctgggagctgccgtagattttcaaaacgctttagagccaagatggagaaacttcctgcgactctccgagaatccatggatggccgatcatgttgtcgccggatcgattgtgttcccagccgcgggaatgttggtgatggctactgaggcggcgcggcaactagctgatagcccagccaacatcaaaggaatagaattccaagaccttcattttatgcgaggggttgttatcccagacgaggaacgcggcttggaaactcttcttcaggtctcccctcatccagggatgccgggttggtatcagttcggaattttctcacttccctcggggggtgcttggattcaacacgcgaagggtgcattcattgcgcgattcgagaaccgaaccgacgatgagcataattcaaactggcaagcagcgttggaacgcatcaagaatacccaaacagtcgccaaaatggctgacgttggacaagcacgtgaatggttgtctaacacaggaggactcaccgtaggaccggccttccagacagtcactggcgtttctttttgcgattcagagtctcgtctctggctatccggggtcgtcacagacacaaaacaatcaatgcctttcgaaaaggagtcatccagttttatccatcccacaactcttgattgcctcttccagtctgccctgttgtcctgctctgatgcattatccagcaacaaagcaaatattccgatcggagtggacaatatctacatatccaatacgttccaaccccaaccgggggagcagtttgtcgtccacacagagaccaagtggcgagacgggaaatcacaatcccactgtatcgcgtcggaccccacctggtcacaaccctggatcacgtttgaaggtgttcatctcggtcgccttcccttcaactcaaattctctaaagcaagaggaagcatcttcggagagccgatattcgtcgattgtttgggatgaacacttggagtcgccgcttgtcactagccaaatcaatgacggaaacaagaagaaggccgtgcaagccagcagtctccaactaacagactggatcaagagattgtgctataccaacggggatgccagagcactcattactacttcggacacatcctcttggatcgcaagtctacaagagctgattccaagtgccggcaagcggccgtgcctaggaaggatgacagtcgcttcatgtggccacgaaaatcaagtggagggcgtcactcccacagagaacagcctcccgggaactcacctggcatccctcactacattaagcgaacttccatcttcgtcgctcgctcaggataaatatgatttggtcgtgatcgatgagcccaagtgggacgacaaaatcattcaagttatcctatcgtgtctgcccaccattcttgaacacggaggtttagcagcaatacgggtatcaggaaccaatcgagactcggcagcagagaagttgcaacgattggaaggccttgaaattcacagcacgaccaaagatcgcgagtttatcatcgcgcgcagaacaccagtctcgtggactacagactccgaaatctatattttgagtccagccgacaaatctaacacactagctgttttcgagcaccttgggaatatatttgccacccataacgttcgtctggtgcctgttgaattggaacaggtgggtacactagcaggaaagactgtgatttctttgcttgacttggcaagtccctggatatccggctggacggaaaatgatttggaacgtctccaggagttgatccgagttaaatacgttctttgggtgtccccttcctggagccaaggggctgttgagaatattggatctggtgccacaggcggccttttgcgaacacttcgcaatgagcagtggaacaccaccatcccacacctattggtcgatgtggaagatttggaagacaagttcggactagcttgtggcattctccaagtcatgcagctcacgacgcaggagagctcgcgccggccagacttggagtatcgtctggcaaacggtcggctgctagttccacgggtcattgagactccaacagtggatgaggccatgcacactcttatgaatggccccaggcctgtgatgtcagaccttacacttgatccgagacgccttgagttgaagttccaagatgcagacaacgcacgctgggaggaacaacaaccattcgaagagggacttcgcactgaccacattgaaatcatggttgaaatggccacaatcttcgatttacatggggatcaagggaagacaccagagacagctcttccaatgttcgaaattgttggaaaggtaactcttatcggatctggtgtgcacgacttggctgttggcgataaagtgttaaccctaacatcggcgagctcgggactcatgacagcaatgcgggtcttagaaagtgacactatcaggattcctgcaaatatggacccaaaaaatgcgatatcaactcctctagcgtacataaacgcttatcagattctcacccaagttggtcgcctcagttcaagttcctcggtgcttttggtcggctcaatcagtcaaactctccaggccatgatagattatgcccttgccatgaacatgcaagtcatcgtggcaactgattctgcagataccaccgagaaccttcgttctcgctacccagtattagcggatcgaattctcggcgttcacggtagcctagaaacaagtgtgtctaggctaaccaacggatgtggagttgacgccagcatttgcttccttggcggctatgcgggtcggaatgctgctaggtgtcttgtcccaggtggacagtacattaatctatctagcgagatgaagatgagtgctcttccagagagcttcattgacagtggctgcacattctcttcgccgcgactgcagaaaattttctcggagaaacccggcaatcttcatgcttcagtacggcatgtggttgacttcatgaagcagcataggatgttggaccgcgtggagtcctattctatgttccccgtttctgatctccaaggagctttgaaacattgcaaagtggccaatacccgagctatcgtggatcttcgggctcctggaagggtccctattgttctgccactgccaaatcttactggcttgccagcggaaggcacatatatactagcaggtggattaggaaacctcggccttgcgcttgccgataccttggtgcagtccggggcccgccatttggttttccttggaagatctggcggggcacaacctggtcaacagctagcccttgatctccttcgctctcatgggtgccgcatagatgtactgcgctgtgatatcgcccaacaggcagatattgaccacctgtcatacaagattcggagtaagaactggaccgttgcaggcgtgattcagtgtacaacagttctgaaggttatttaccctcatttcgttcgttttcattgacactagctaattccttcgtttattatcaggacgcaatgttcgagaacatgacttttgatgattggacccaatccacacagtccaagatccgcgggacactgaacttgcaccatctattttcggaatttgaaggcttgggtttcttcattgctttgtcttccgtggccagtgtcattggtaatatgggacaggctaactattctgcgggcaatggtttcattgacgctctcatggaatggcgacgcagtcacggtctcccaggtcattctatcaatattggcctcgttccagatgctagtggactcagcgacattgccgaagatcaagagcaacgccgccgccgatacaaacatcttgagggtacagaaatcatgacccatgagctccagaccttgctcagagtgatcattaacagcaagctttctcttccatctcaaataattgctggcatgaccgatcatctgtctcgcagcaatggctccatagcctgggttctcgatcgaaagtttgatcaccggctttgccttgctgccgatgacactgaggactctattcagactagcgccttactcaaggggtgtgactcccttgacaatgcaactgaggttgtccttaacgctctgagtgaatatctagcagatgcaatggctacaactgccgatgctatcgactcagatctaccattgtccgcgttgggaggtatgtcttttgatgatttttccccactgtgacttttgtcttgactaacactggcttctaactagttgattccctgaaagctacagccgttcaaaactgggtctctcgcgaactggggtcagaactatcctccttcgagtttcttggctcacaaccgaccaaggcgttagcgaggaaaattgcttctactagttcgtttgtctcggtgccgagctgaaggactatctgataatccatactcggtatggattagctcagaacaaccttttcttcacccatcatgtttcctgtttcaatctcggtttatcaaatctcatttttgggtagtttcaatagttcagtatatgtgttttttacttacaatacgtcgtttcgcgtacgaaatatacgaaatatatgaaattttccaatttgccaagacctgtagcccgtgccgcaggtgggtcccgtcaacaaactcacatgtcattcaatttatcttcatccttagagcagcctcgcatattttctggcggatagctccgctgtgcagattgcaggaccaatgcagcatgtaatggccggggtgagagtcgccattgcaatatagtgagggggatcaagcacgataaacagcttcatccacgagtggctccactgaagcccatagccttgacacatcgggaactggatcgacacttcgatctggatgatctggttgatcaacaaaaagaccgagttttcgatcccgtggagcgggctggggtgaaaatttctgctgtgcaatctcgcgaagacccctgccctgaacgatgacaaggaacgtggactccgttcggagtacggagtacccgcggacacgttaccctgttaagaaacggttgagctgtgcggtcttccttgctgctgcatggatggtataatatgtgcatgtcacttgggaagtaaggcgataaccccacttgcctatggagtgagtaactgtgtagcttttacaagttccaccgtccattccgattttttaagagttgatttcgctttcgatggtctcgcagatctcaaatctaggttctatgctagctcaagagaaaaacccacctcgattatgtatatacactatggttgtccggacggtatcgggatctaccaagccggcaggtcggcgtctgtccagttacatcggccgagatactccgaattcaatcaaaattcaacacgaccctaaatggaaaggcttcgaagcaactacattgaggggtagtttgtggagcttgggctggaccgtccacgttcccaccgagtctaagcaaggcaagccactatcgatatgctactccgtactttgtactccatacaacatagggcatctccacaccgtggagcctttcatggacccaagcaggtccatcaatatgtactctgcaaggccggaactgtatggagtgggattgcgcgggtgactttcctaggaaggtcggactaaaatttgtaaggcgtcttctagtcttgcacatgaaaaaaaggaataaatggaataaacactctgttgtcgtcttacaatctctctccccccttcctctctctttcatatccccatcctttcatcttcagctatgacggacgctgagaagaacgatctatgcatgccggtacccccggccaaggctattgtcatagatcatgacatggccattaccccagatcctgaaaagtttattggcaattactcttccaatgaggttccatccaatggccccgattctcccaatgtggttgacctggaggctcagcccacagagccccgacgaaagcggtttgcgcacttcagatatgtcatgtttactgtgtatcgccggctcttcactgtggtattttgcgcaaatctcgctgtatttctctacgtgatgatctctgatcggaagcttttggcacttgtgaatgcaacagctgtcaatttggtggcgtgcggtctcgctcgacacccgatgatggtcaacgccatctatagagtggtgtgctcgattcctcgaaaggcacctctatctttgcgccgcagatgcgctaaggcagctcactacggtggtgttcacagtggctgtgggactgcatctctggtgtggtacattggatttgttgccatggtgtcacagatctattggacaaattctcccatcagcacagtaacagatgccagtttctcggccgcaccgatcgccgtcgcctacgtcattcttgccctacttgttgtgatggtagtcgtggcatacccaaccttccgcaggagaatgcatgattacttcgagctcacccaccgattcacctcatggctgatcctggcccttttcgtggccttagtcatgttattcgcccatgacgtgggcaatgcagagcagcaaactcttggctataccctcgtcactcttcctgcattttggctgttaattgcggctgtcttcgccgtggcccatccatggctattattacggagggttccggtaaaggccgagcccctgtcttcgcatgctgtacgactatcttttgacttcaccccgatcaacttcgcaaaaggtgtccaagtctcaaagcatcctctacgcgactggcacagttttgccggatttccagaccccattccaaccggtgaaaagccatttgttaagggccacaggcataagagaagctggtcgatcgtggtgtcaaaagcaggtgattggacggcggataccattcgtgaaccgccaactcatctctggaaacgcggggcactgatgcgtggtgtcggatatggtctgcgtgtcttcgaccgcattatcatagtcaccacggggtccgggataggaccttgccttgggttcctaggcgacgaaaaccggcccttgatcaaggtcatttggcagacacgtaacccggtcaagacttatggccaggatgtcattgatctcgtccataagatgggccctgacccgattatcttcgataccagtcgtgatggccgtgttgacatgctccctatcgtgcgacagcaagtgaaggaattcaaagcggaggcagtgtttgttatcagcaaccccaaaatgactcaagatatcgtttacgagtttgaatcacaagggattccagcctacgggccaattttcgattcatgattcacgaaacacaatatatgttgccttttgattttattctaacccagttatgatatacgtttatgacctacatttcggtatttttcgagctatgagcctttcatccatttgtttatacgagtcaagtctagcaataaaagtatttcatataattatcaaaccctaaggaatctcatgtgatgccatgtcatcacatatttacatgtgcacagggacggagcgcctgattttgcagggtcggtgcgtgaatacgcctgagctctgctttatcttagactgacagaaatcaaaatacctgaattaccatgacaaggtcagttcaaacaatgaagctattcccgccatacaaatttccttatgtacccatttctcggcgttgaagctattcctaccgtgcaaatttccgtatacaacttctcggcgttgaagttattgtataaacttccatatacacccgttttatacggttggggtcggttattaacgcccagcaaatgatttgtatggattgtatggtctgtttacagtacatggtatagagcggtgtcgaaagcgacgaataattcaggcataagacctggaaaatcaggcattagacctttggccgctaactaactatgccccttcgcatacactatcccagtggcaacggatacagacttcactcctagtcctatccaaagcggcattgccactgcttgtcaggactatatatttcaggtgagatacgcccacaaccatggcgtgagccttccgctaacaaatcacagactgatacatgcgacagcattgtgtctgcagaaggctttttgacggaccatcaattcgttaaatggaatcccgtctttgggacgtattgttccggtctcgatagaatgggtcatagtataaattcaaagtagcataggtcgttttgccgatgaagggtctaagccttcgcactttctactcagtaatctgtcttaagatttaggcacaacaaatcaagtcaattcatctctttaaccctagaagcaggtagctctcctatcatatctcttatttcttccctacaaaccaaacgcaaggcatacaggatacaatgattggtcaccccacatagtatctgtaagctcccacctatcttgaccaggctttatttgtttgattctttggaaatagtaatccggaacgcaaagctgcagtcttgtccactctcgaccctttgatagtctgtcaaacggcttaaggaacgtcctcagcctctcgtcgtcaaagaagatctcgccaatttcgctcggtggcattttaagttgtaggcgtagtcgatgtacaccacggaaactctgctcgaacaatccgaagaacgcggcatatgttctcatccaatcatcctcgtctggcccagctttgcatatattaacagcaaacgagatttccatagacgtcataaaagaggcacatcgcggtgccaaaatccttgatatgagaaaaggagtatccatagcattgtccatcacaaagttatttgtcccatagagaacatctaaagcttcttcgtatctgcacgatgataagccattgtcctgatattatgagcatagtgacttacccgatttggcagcatctcaaccactccccgccaattgtcagcctttgcgactcagggtaccaatgtgaacaagggtcatcacaagggtcgttgatgaagtcatcacattccatacagacacgatgccaccagtgccagcgaggtcctcctcgtttcgactgcggccaagatggcaacggctccatccagaaatatcggatgtgcactcgccgaccacccataagctcaatgtataccaacctccttatctcagccggtagacgaaagaaggaacactgctgttgagagctgcgctttcgagcaccaagcttacataagccttgttctggctggatcggcagtttccatcgattgaatatatcgccattgatctcacaggtggaatctgagattcctattgcgtttggggaacaatctctcaatttgaacttggactcttttttcctgcgtttgaaaaatttggtaaaaagttttggtgccatgagggtggagggtggagtctaggagcgtaggagagtcggggtgttgattttatatgtgcttgggtgtgggtgaatgtcaccagtgcgtggtaaaacagaagtactaccgcaaaataggaggggaattaacccacaaagggttgggaccggtgtttttacctcacaaagaatcaaagatccttgcaagcggggaaccgccattccataggccgggatcttcatcttgctctttctcctttagttcacaggcttcctcttctagtcctgatttccaatggcaacgagatagccctcaattgtgacaataagattattgtcggaggcatgtttgggaccagtctgataaccagctcgattttgatggtgtcaaattgcctaaacattatggaaatgccaaacatcgagaccagagtgatactgagacgaaagaaacgaaaacgggcggcggcctcgactcgtcatcgtggaagagctcgtgttcgttttgaagaacaacatgaatacacaaagtgatgaattaggatcggacagaaagaggaccaatgctagatcaaagagatccccaggaagctcaaagaaaagccaatcgaaagatgaaacgacccgtaacctggaagagaaattgcaatggcttaagatgaacatttgctagtagcgctaccgcacctcaggcagaggggcatgttgacatgctactgatcttgagtccggtagggattaggaatactgaacgctgttagtagattggtttggatatacttctcggtgatgctgtactagcatgccatttgtatcacgaacatgtagttcggagaaaccgttgacgagtttcgtgcgacggacaagtttctaccttgtcatcataatagcccgaattgcgctatttccgacggctaagaaaaggttcatattatcaagtgattcctggattcgctctaaccccacccactcacagaagatagaagaagatcatgatctaagcacaggaaaatatcagtgtcttttcgcgagaagaatgataatcgtgccaggcgctaatcgaaactcaagggctataagaattcagtacatatttcgaatgagaggagcgtatgatatcttatttattcccactcgtacgtcaaattagacttcatcctaggtagtatccgagataactggggggaaagacatcactccactcgtcttcacatcttgtaatctaagacccctaaatcttcctcctttttgagggcattttccatcttcgcatttgttcgcccacgcgcttgtcctgattctctgctgtcgtccttgtggtcgttctctttctcctatttcttctttccctctggctcgtttcccgcaattttgttcagaaggagctgacaattttggacgaataggtggtgatgcaatggtgaagatgacagtaatgcaccagcgccacttcggtcgttgcaatgttgtaccctgtcaccctccatcaatccccgatcattttttatagttatttcgcgcttgagtttgacgtaagctaggggaacactagttagctaacttctggtcgctctgtcgcaggaatttgagtctggttcgatttgggattcgagactggcgtcatattgggtcctagccgctaggtactcaggtaatcgttgggttgaacgaggcggcgaggtcagggcgaggtcacatggtcgagtatcttatccattatcatcatgtgatcattggatgacaaatcacacatgaaagtgaattgtcgttctttgaagctacaatgttgaatcatatcatgtggtcgtacagtgtactgcatatgtccatcattgcatatttctattattgaatgtggaccattccactcatatcgcaggtacggcagtctcccaccgccagtgcgccatatcagatgttgcctgtagggtttgtttttaggcacccatgaggctagccagggcttttcccaatcaaaacaagatcattgcgtacgagatttttggcaacgaatgaagtgcttttccaggcattagcggggtacaccaggtgggaggcaaaacccgcccagtgggtgtatataaattggtagatgtgcccttttaaatgtccatgattctacaaataacatgcattcaagtcgactaagaaaacgccatgcagagaggttggagaccatccaggaccttgtcccatctctacctgcagccccattgacatccccgctatttaccgtcttccccgccgagatccgcaatcgcgtttatacgttcgcccttgagtccgaggatgttctcacagacgacagttctcactccctctacaagcaaaatgctttctactaccgacccggttataagcagcccaagcgcatccaaactgccctcctccagacatgtcagcaaatctacgctgaggcgtccctcctcccaccggctgtaaatgagcatactttctggttttatcggtctccgccgcatgtcaatgatgcgtcgtcaccgctaaattactttcgcaagatgaccccaaaacagcgggctcaggtgcagcatctgcacctgttcacccaacagtatttcctagaggacaaccattggtctcagatatgggaggggttgaagataggcgacgacgggcgcagtttgcgaggggagtgccggatcgccccgaagaagatgaccatcacctttcgccacacggactggtggtactgggagaacaatgaccccctgggcatcgatccgttccggcccggaagaacacatgcaaccgatatgggcaaggctgtttccccgcacgacgccgctcgatcatgggggaaccaattcagctctatcccctgccttgaagaattggtgatcgagttcgagaccatcatgcggaagagggaccagctagatgacatcatacaacaagctctcgagtggaaatttcccatggaggctgacaagggcttatatctggtggctgaccccaagtcgaagagcgcatatacttgggctggggcgaaagaggcggagctgaaaagacagagacctgtacgaccggtcgatgctgaggctgagtcagaatctgcccacgaacaggagccggttcctgcagctccggctttggtgccgtatgatcctcagtccgattcaggcacaaatagcgacattaatcttggaaaccatcccccatctgacacagatacggagaagttctatgtcgtcttcttgacttggaggaaacagcgtgtcctggagtgagctactcatcccaacctcagtatcacgagggatctagattttgttcctacaattctgacacagactacgatcccacgaggaatgtaaaattgacacattgttagatggttcatataaattttcatactttcgcttcatatataaggaataacatcctagtgtcgtatatagtaaagtacttctagcttgctgcacgaagtacccaacctttcaaggttagaaggtacaaatgaagaggattgttgctcgcatccccccctgcctgaattttcagtggtgccataaagcaaacatcatgtcccagcagtaataacgacgcgaatttgtatcacagtcgataaaagaaggtaataaagaaatatgtgaaaatacaaagtgtgaaaatagacgacacagctagcacctaagggtaagtaaaggtgacatacaaaatttgacgtatgtagaacacaaggggttctaatatgcgccccagagggtggtctgatgtttgcttcatcagagataatccgggggaggaactggaaggatgaacttcggaaaatcgcgaggagagaaaaggagatttgaaagaatcggagtagaaatgtttgcccgtagtcatctgatggcgcgtttagaaagccaagactggatttcaacagctttatcctaacgaaaggacgtagagtagtagggatggcgcgattattgaaggcaagaaagatgtccttatatatgaactagatagaatagatacgaaaaaatcaatttagcaaacaatcaaatcctggaatggacctgattcaccaactgcgcaacagtgtcgactatctcatccagcaaagacacagcaaagtccgaccacgactcaacagtgacaacttcgatgcacaaagtatcccccttggggaatgcttgcaccttgatttcccgcaacggctcgaaatgcgggtagatggtctgcatacgactactagccgccatgaaagacaaaccctcaacatgctcaacatcctggtgcacgaccgaatcaaaccaatcaaccgtctccggccagtcggtacagtctttgataatttccttgagaccgattccttcgaattgcgcgctctcgagatgttgacgctgtacaaaccgcaaaagatccatggcactccatccatctgcgaacttcacccgcactggcacatactgccatgatggtccaacaaccgcgtcagcgttggggaggtcaatgttgcggccactcaccacctcgccaaaagtgacatcatcaagggagagtcgtcgcgcgaggcacagcgcccaagccgctgtcggtagggttgcgactgtgatttcccgtggtcgcgcggctatattgacatccttggagatggcaaaatgagctgcagacactacagggatatcgggttggattcgtgtcatagacgatccttgaaggagatcacgccagtacggaatgctgactggcagattagtgcgagtcacgtggccgacatacgacgagaatggcagactcttcggcactggtcgtccctcgtacaatgccgatagctgctgcagcaaaattggaagacagatctcatcatactgggcatgagagatgcgcatgatcaggctgctgggcccgtcaacatgccgaacgaagagaaatttcaaaaatggtgatccgaggggaatacgtgactgaacatccacatcgcaaagtttctggctgaacgcctccacgtcactttcaatctcatattcaattatctggcagggaaggtcatctacaaccactcccaatgagacaccctcatgctccacgaacacagttcgaaggatctcattccgggagacaagttcctggcagctttggaacagttgagtgcgatccacctcggtatccatgtagaaaagttcgtatcgcatggaataacgaggcagctggacagttccctggacggcaatttcctggagcgggcgacttggataggcatccacaatcttccactcaggctgagcaagcaacggggtcatcttgttgatgaaggcatccacatcggtcagatcgagtgagctgaatggcgcgtattcccgcgatgtagcaactgatggttgagcctccacggcgtgttcggccatgtcaaagagagatcggtgatcgaagattatggttacagttagctcaaggccatccatacgagcctccgagaccagcttcatagcacgaattgagtcacctcccaaatcgaagaagctgtcatccaaaaggatatcctcacagggaatgtccaagacctggctccagacccgttggagcttttgctgcgtgaccgtcgtgatggctgcacgaccactaaggtttctgtttcggggtttgatttgaccaacttgcgcgtcctttgcgcgaataataatcacagagccgtcactggtgtatttccccagctggtttgtcgtgtacagctttgttggttgcttgaaccaggatggattggcaactgggttgccggaagccagttcatcttcgctttcaacgaggagctcacccaccccaccaggtggaacaagagactcataatcatttggattaacgatccaagttgatgtgacaagtgagtaaagatcccccgcaggaaggcttgccgggccaatcttggcgagacggcattgttctggaacatccgtctcaattgtcgaatcgtatatgtgctggattcgctgagtcggatcctcgaggatctgctgcaccagccgatcaaactgttcgagcgcttgctccatctgccggacatcaatggttttcgagtcgaagctggccatgacaaggaacccttttggatcaacggtgaagacaagcataagggcgtatgaattgaatttcaacgcttcccgggcggcctctgcctcgcttgttggaacaaatgcggtggctggttcttcttccgaagaggatacgctctcctcgaccgttgggtgaattacaatgcctgtgcgcaattcacacgcctctcgagcatcggcgttcaaacgtcgaatgtgctgcagacccatgtgttcgtgaggaatgcgatctaccgtttgatcatgaatctgctgaaggtagcttgatgctcgagccttgcgatcgatacagactcgaaccgggacagtggtgatcattgggccctcgatctcctctactgctgccacgggagctgtgcgaccggtcatagtctctccaaacacgacgtcatcggaggatgtgtaatacgcggctaaaagaccccaagcacctcgaataagggttgcaatgctcgttgtagagctcgacgaagcccgaggcagcttgacgtaatgttccaggagagaatcagcacgcgcttgatacccagtatatggaatgagagggaattgtaacgcggtagcgccctccagttgagttgcccaatatgtctctgtggaggctcgatcagtgtcattaagccatctgatgaagttcttgaacggtgctgggctgccgatactctcaccacgataggcgcgattcactcggtcaactatcaatggcattgaccacccatcataaagggcatggtgaatgctcaggacgatgtagattttgccggtcgcttcatcctccacaatggcgaaacgagcaagctcagttcccagagacatccccttgagtgtatcgctactgagatactccgccaagttggaactactgagccatggagtgttggtccgtacgacgatctgcatcaaaccccggcgtgggacttggacaatccttgttcgtaggatcgcggagtctaccgagacactctcgaaagcagactgtagtcgtgtggcggtttgaacatcctggagctcaatgaccctctgcgcgacataggcatctgtatacttcgcggagagggccatgagggcttcttggagaggtgtgcatggatacacatcagccacctcttcaggatgcaagttgcacagcgaagccacttcaacccgcgcagcgtcggcttcccagtgtgctggaagtagcgaaaatgggggaacctccactggagctttgttctcaacctgtttcattttgagggctagatgctcaagaataggcgattggaaaatatcagtgacttgaatagcaagaagctgctctcgcgcagcagctaccaacttcatggctttcaatgagtcacctccgaggctgaaaaagtggtcattgaccccgatctctgcctcatcaccaaatatcttcaaccataggccgtggagcttgcgctccatctctgtccggggtgttaatttgacaactgtggacaatctaagctctgcaatatgtcgccttgttaggccattgccgagagcacgcagctgcttccggtctgtcttgagcgacactagaagtggcatgtgattgagtggtatatatgcggtggggatcatataccggggcaggtttgaggcgagaacatcgtcaataccagcgatcaacttttggaatgaacttgaaaatgagatgatctcgctgattgtgcccgtcttatcactcttttcctctgccacaaagacaatcaatgtggcatctgctttcttccccccaggaaatatcacttccgctgcgacacttgctccagcagggaagtaatttcggacgtggtgctcgatttcgcccagttccacgcgctggccgcgcagtttcacctgttgatcggcacggccgatgaaaacaacactgcctgaggcatcaggatcatatcttaccaggtcaccggtcttgtagagacgacccttgcgacctggcacatctcccccaccctcaagcaaccatgccgggtcctcgatgaaaacctcggcggttttctctggattattgaggtatccatcaccgaccacggggccttcaacaagcagctctcccacggcgccgatgggcatcaatcggtcgtggttggatggatctaccacccatgttgtgcctccgactccctgtccgatactggtgtacgatcgaccgggagggatgtcgttgttgattgtgcaaccaacagtgcactccgatggtccatatgcgatcacgaccttcgtcttctggccccattcggccgcatcgctagcagagattgactcaccaccaaggccaatgacctccagcgatggcatgatatcaggagccaagacacgtgcaaccgatggtgtcatgtgcgccatgtttacattcaatccgcgaatggcgccactgagatcgttgactcgttggtcttctgagggcacacaaatgcaacctccgttggccaaagtgcacagcatgcagtcaacactgacatcgaatgcatacgaggggaagtcgagcactcgcgagtgctctttgtatcccacagctgcggcgcgaggtactgcaccactagtgtagttggagtgcgaaatgactacacccttaggcttgccagtactaccggaggtgaactggatgtaaagggttgacgacgctgggaccacaggtaggtctaccgagagtgatttcaatttgtcttcgtcgaccagcgggccaacaataacttgctttcctcctgggacaatgcgcgatcctagttccgcctgcaactccgaggtcaagataaactcagcctcaacctcgctggcgatagtgctcagtcgtccctcgggctgactaggatccatgagaaccaatgcaccgccagccttcatcactgcgagcacaccgacaattgtccacatagacttttcaaagcagagtggaacagccttgccaatttgcagtccgagatcaactagatatctggctaggtttgttgagcgctcttctagctgtccataggtcatctctccatcccaagatacgactgcaggacgatcgatttgactttgagctttttcactgattatatcttgaatgcaatgatcgatagttgggggcattagcccgttccacttccataactgtgacagctctcgccgtccaatctgaatggccttagccacgggcttatcgaggtcactggcgatagaaataatgaggtcggcgaagatatcaggtaggacggcttcgacaggctgcgtggctgtcggggaccgcggagtcccgcgaacatacacaacaccatccgagagctttgcttccagggcaaatgtccactaatcaagttaataaccgatcacagctataattttagatctacttactttactctcaagggaggcatttcgacataagagtgtatccgaaaattctccgtcgaatttgccccgcctccgaattgcatccaaggcggttctcagcgagctgtcttccccctcaatcacatcggagatgagacctccttggagactgccctcgcttacccaagaaaagcctccatcttcactgctcactgttccccgaaagagaaggaggatccaagccagcgcgaaaagttcctcgtgtcttatatccggcagcattggtagggccatacagtcggaccagccaacatcctgtggcttcaattctttgctgacccaaggggtcgcactgggctcgatgtattcacccatattcttggaaaatagcaatatcaagaaagtgtctctagggcttctccggggactacgaagcaacgatctgattaaattatctgatgctgatcttcagtaacggacttggcatcctgcgagaaaccccgtgcctgcagaacagggccacaacgggtagaaacaatccgagcaggtgccgaacggtcattgccaatattgcaatggagcccgttagagtggggatacatatgtatctgagcccatgtatggttataacgcaaattactctccatactatactataccataccataccatacactaacgccaagggtccacgctaagcactgccaccctggacccaccttggcactaaaaaccttactgcagagccatggcagtcataattcgaaactttcgatattttctttggtggaagattgtcatcaatatgacgatcatcctcttcaatcttaccattgtcgcaagtttccgcctcgatcaattacgttgattgcgacatcggatatccgtcgattcatcacattggtgatttctgaaccagctttggaaattctcgttttaaccatgtatgggaggctagatcgacttccccctgttgttactagtctgcgccaagtagcaatactgagatacacggatggtcctttgtagcagccaaggtctctggtggacatagacaaggatgatcaattccctacatcgcatgaagaaattccccgagccggaataaaccgaggatgaggtggtcaatgccgacattgtatatctgattacttattccctcgtgcatctcctctgagttagtagcattgtcacgtcatgtctttgagttctctccccctggtgcggctaccggagccatacaagacaacctatgaattgcatgtcgtatccaccgagaaaaacctccgcaagtttcagctactgagatctcctcgcggggatgaaggcataccacccccaaagccattggaccatgcgtcgttgagattcacagatctgtcccagcccgattcttctttcacaccagacgaaggaaacaactcaccctgggctcgcgcacagagaagtccagttacctatatctcatgggaaagctcggaggcaccaacagtgggacagatctggaatttggtctatgctatcgagaccttgcacagcgagttcgagatattccgtgccgtactgtctggcggtgggagtgatatacttgcacacgagctacaggctgtgggcttggccattgcgcaccccgaaccatctgctgcgccagggaagcccatcccagtcaccactagccatctcggacagctggtcttttcccgcagtagcttctggcaaggagctggctcacccttcggtacccgcccagcctgggttgctgacccgggcatttacagctatatgagaaagccgttgagcaactacccttcccgaccccgccaacacacagtcaccactggtttccccgagcgtcgagtacatgcccttcacccggtacggccaccaaagccatcccccggctctcgcatctacagccgctacattccacacttgaacgaatttttctcggtctatgcactagactacacaaacgacgaacatctggggcttttcaataagtggcagaatgaccctcgagtggctcaggggtggaacgagactggtactttggaccaacatcgtgaatacttgcgcaaaatccaggatgatccccatcagatcgctgtgctggccaagttcaacgatactttcttttcctatcatgagatatactggacaaaggtatggtttctattttctccagcaacccgactatggctaatttaaattacaggaggaccatcttggtgcgtattacgatgctggtgactgggacagaggccgccattcgctagtcggtgatgagcgtttccggggcccgcaccgcacgattgcgtggtggtctggattgatgcattacatcttcctggatgatccacgtacggagtttgtgactggagagccaaaatactcgaatctcgcccctctgacctacgaccatgctacgggcatgaacctagccaagctggtcgatctgccacataaacggtcggcgctcatccttggtagcagggaaaaattcttccatgtagcacccctacgatttgacgggtctgatactctcgatcgcaatccattccgctcattgaagttgtgatagtcggaaaatgtgaaataagatgtgattgtattatgcatattatggacttgtgagcaagacttcagacgtataccgaggcagattcgtacgtaagcctttaatccacaattacctaggtagcaatgaagccaagcagatcctcttcacgacagtaaacaaagcgtaatctaatcagattcgggatgtccccgggacccctgggacccgatattttgagtttgacagttgtaattttccccatttaccctaaaaagtaaagttcgcaacagcagccaagcaggtctccggggttaacattccggaatagaacacatatgtattgggatcggcgtatcctaagaaattggcaaaccttcccaagagaagccttcgctcggacgaagggcatacggcattcttggcccagccccgagcccaccccaggcccacccccaagaacctccaagcccaaaacaaaaaaaacaacaaatacatactcttggctcttgccggttttatttactagtcgatctgataaagggttcaatattacgtattgtccgacgtcggcttttcactgtaaattcttggtaatcgagtcattcggcgagtggagtgcatggctttctgccattgcacttactttcgggataaaatagcaaatgatcttcctaatgttctcatctattcacgccgatagatagattttttattatggctgccgaagatgcaccagcgcagaagcgcagcgtatgtcacccctgaatgcttaggtttactcaagctaatatcgtcacagtggagggagaaagctgtcttctttcgcctgtttgtctatggcgagcctagcagatcagatattgccctccttatcctgggccttgtctccgcaattgcctccggaattccttttccgatcatgtcgattgtgttcggtcaattggtggatgagatgaactcgacgacctgcaacgccaacgacaccaatggcgactcataccaagatagtattaacaagaaagtcttgttgattgtctacatcggcattgcctacctctttttgatttatatctatgtgtttagctggaatctgactggtgagcgactggctcagcgcctgcgtgagaaatatttcaaagcccttctccgccaagatgtggccttcttcgacaatctcccagctggagaggcatcctcgagaattactggtgatattaccaccgtgcagcagggaacatctgaaaaggtcggaatcgtgatcaacagtcttgcctttttcgtcaccgcgtacatcgtggctttcatcaaggatcccaagttggctggaatgttggtctccttgactccggcctacttgatcatgtctctgttgggaggatattttgtgcaaaagtactttggtcgcgcactggaaagcatgaccaaggcatcctcggtagcactggaggcattttccaacacaatggttgttcatgctttctcggccaacgcgcggctcgaggaaaagtttatcgagtttttgaacccgtccaggattgctggaattcgcaaatcaattgccgcggccacccaggctggtttgctttactttattgctttctcggcgaatgcactcgccttttggcaggggtcaaggcagattgcggactcagtagagtccgatgctggtggcatcaccgtcggggcaacatatactgtgatttttattctagtcgatggtaagcatctctatccgtgaatttggttgaccacttgctgactacttctatctatcagcgtccttgatcctcagcacagtcgcacctttcatccaaagcttcgacgctgcttcggttgccttttcaaaattgaaggctgatatagagcactcatccacaattgatggcacttcgaaggatggagaagtattggcggaggtcaagggccatattgagctgcgcgacgtttcattccgtttcccttctcgtccagataaaccagtccttcagaatctatccctttcctgccctgccggtcaacaaactgccatcgtcggcttgtctgggagtggaaaatccactgttgccgggctagcaacaagattctacgatgcgaccgaaggaaccgttttgttggatgggcatgatgtcaaagacctgaatgtacgtgcattgaggagcaatattagccttgtccagcaagagccttgtcttctcgatcgatcaatttttgagaacattgccatgggcctgatcaattcccctgcacacactcatcttcaaccgattctgactggcactgcgctggttgaaattgctgccgctgcaagggagggacaatctcttgcttccgcctctcttgaacacggtgatcaggcacaagaggtggtaagactggtcgaagatgcttccaaattggctgatgccaacaagttcattgaaaagctccaagaaggttacggtacttcagttggttccagtgggaacctgatcagtggcggacagaagcaacgtatctctttggcccgggccttggtgaaagatccccgaattctcatcctcgatgaagccacagcatctttggactcggcgacagaaatgcgcatacagagagccttggagaccgtggccgtgggccgaactgtcattaccattgcgcatcgtctatctaccatcaggaacgcggacaatatcatcgtcatgagacaaggaaagcttgttgaacaaggcactcatacggagctacaggcagccaatggtgcttacgcagagctgattcgccttcagaatctcaatgttgacaacgctcatgagggaacatccacccgatcggtgtcgcctgtcaatcaaatcacagaaaaggttgaaccctgtctttccgtggccgatgaaatccccgataaagatgagacgatcgatacttctattgcccaagactccaagtccaaagaaaccggcggtgttgtcgactcacacaggtcattttcctcaacagtcagctccctgggctctatgttccgaccgtatgcacttgttctgttccctgccgtgaccggcgccattgtcattggcggcacatactgtgcttcggcagtgatctttggtaatgtcgtgagtaagctgagtggctgtgaggagcctcagaatatccgcgatgctggagagttctatgggcttatgttctttgtcctcgctatcattgaattctttgcaaatttggtcagctggtctctcttcggttggatggcagagaatgtgatctacaaagtgcgagttctttcactgcgatctatcctcgagcaagacctccaatggcacgaatccaatgaccgcaacccatcgttgctactttccttgataaccaaggacagcaatgctcttgcaggcctgactggctccgttgtgtgtacaatgttgtctattctcatcaacctattcgccgctatcattatgtcgcacattatcgcgtggcgaattgcccttgtttgtcttgctgtggtacctttgctcctggccgctggctggatgcgagttacctcactagcacagtttgaagagcgccacttggaggcttttgctcggtcggtgggaattacagtggaggctgtcaactccatcaagaccgtcatgtctctctctgtggaagaagagattatgggaacataccgtcgttcgttggcggcacccatgaaagagataacccgccaaagtgcctgggccaatatttggcttgccatcgggtacggtctcagcaacttcctatacggcctcgcttattggtggggagcgaaaaacatcattgcaggatattattctcagacgcagttcttcattgtccagctagcgctgcttgtcagttcacagctgtggggacagatgtttgccctagcccccgatgtatcgcgagccttccaggccacccgccgattgttaaatctgcttgaccttggaaccacgaagaaactgtcagcccctatccgaacactgcctagcaagcttttgcagtctacgagtgacgtcgagtccacggcagtcacccgcgagaaactcgaagacactcgcaatggcatcagcgtctccttcaaacaggtccgttttgcgtatcccgcacggccagatgcccttgtgcttcatggtttggatctgaatgtcaagccaggtcagtttgccgctttggtcggacctagtggtgctggaaaatccaccatcatttcacttgtcgagcgcctctattcccccgcatcaggcaccattcatgttgatggccgagacgttgcctacggtgacatttccttccgtgactccattgcatatgtaccacaacaaagtattttgttcgaaggaactattcgcttcaaccttgctcttggcgcacgacctggccacgaagttacgcaagaggagttggacgaagcttgtcaattagccaatatttacgacgtcattacgcagcttccggacggatacgatacacactgcgggccaaatggtgatcgcctgtccggaggtcaaaagcagcggctggctattgcacgggcgctgatccgaaagccgaagctgttgctcctagacgagtcgaccagtgctttggacgctgagtctgagcgattgcttcaggatggattggagaaggcaaccaagaacatgacagtgatagcgattgctcatcgtttgtacacgatccgtaaggcggacgtgattttcttgattgaggatgggcgttgtgttgagcaaggcactcacgcccagctggtcgagaggagcgagacctatagggtcaatgccttgaaccagacagtggatggtgaatagaaaaaggtagatagctggggttctcttctagttttgttgatatagatctatattgtttaatctcattctcttatgatagacaatcaatcccctactacatgtgaagataaaagagaaacgtacttgctgtccttgccgtacttcactttcgctccttccccgagctacgtcgagaataagcgagagagcgaccattcgcatagttcacaagaaggacaggtacaagacgacagggcacatagatagctttcctttttcctcactctcttgtacttgtatttagattgaaatgcactcttttcttctgaatctatctggcaggtaacactatatatcgtttcgtgacttttctatcggcttgaatcattactcggtagcttctcccaaacgcatccatttccaacaaactgcttttattagctcaataaatctgggtgggagctcctcaacttactttcatatcctagatcgtcattgaagaacatgttacggacctcgtcgcccgaggacagtcccatggccgggaagtacccaacggcggtttttccaagggccaaagccatcatcggggctacctcaaccaactccacgaatttgggttctgtattgtaccgctccgctaacatctgctggtggatattgacagctgcgaagtgcgcctggtgcatcgccgctccaccgcgcttaataccagaccaggatgcaatatcaccggcagcgtagtgatatttcttgttggggacatctgcggaaaactgaagaccgggcgtgatttggacatatccttcaggatcgcaggcatccttgggaaggtatgacgatgttggcgtgaaccgtgacacggcattgattacatggtcggcaacgagctctcgaccatctgagagcttgagcgtgtatttcgccggagaagattcgctaccgagaactgtatcctggacgcgtgctcccaaaaccacttcgaccttggactcttttagcatttcaagtgcctttgctttgaaatcatcagggaggtcctcagaggagagtagctgttgccgagagtgaacgagtgtcacctttgcctgaggttggagcatcttgatctcggcggcgatctcaataccgacagcccctgcgacagacaaatcaattagtattactcagatgaaagaagatggcgccacgtaccgcctccgataataaccacgccttccgcagctttctcgatagtctgcacagagtctgcagtttcggcaagatatgcctcccgagtcaaagacttaggcgcactaggccactctcttcgcaagcccgaacacgcaatcatgtagtcgtatttttcttcgacaatcttgtgcccgtcatttgcagtattttgatggatacgcgcaattcgggacttgcagtctatcgagtctactcgtccttggatgtgattgatatcgggggactggagagcggggatatcctcgaactttttccagaatgtgctagcatcagcgttggaagctatggccaagggcagtccgatcagatggtctaaaataattatgtcagtgacgtgctttcagatcccaacacgatacacatacaatatccatcgcgctcatccacaatggttacttgcacaggaatcgtgttccccgggccctggtcattctcatccaggctgaatcggcatttccgtccatgacaaaggtcaacgaggttcagagtcgcggccaaaccggaataagaccctccgacaatgagaaccttgaaggggggctgttcctcgagactaggcatagcggcgatcagtataatgagctttggggtaatagaggagaagtttcggggatgggggaaagaaaagaagtcaaactagccggcaaatcgacccgagcaactgatcggaccaacatgactaggtcaaatgtctcaatacccgaccccggaggaaatacagccccaattacgcatgtatgtaactttaaatttcagtgcaaccttgtcttatcagatccgacttcgggagtcttggcaccaggaaacttataatttgttgaatacagatgcacttgatactactccgtgtacactgctacattcttcgactatttccgattcctcgataaaccatacattcttttctgtattcaatatgggcttcgttgttgtccccgccactcttcccgatatccgggccatctacgatgtctggtttgcggctttcaaaggccaattgatcctagacctcatctatccaggaactgatctcaacgatgaggctttccgcaaggtccacacagaagggactctggaatattggaaaggattgagcatggagcacacttttcaatgcattgacaccgacaccggtaaaatcgccggcatggcaacctggcaagtctactggcgggaaaggaccgctgaagagcgtcagaagccctggattggatggttggagggtgaccaacgagagcgtgccgaagggtttttgggacagctttgggagaagagggagaagtggattggccccaagaggcatgtgtgtgagtggtcaccgatccttatattgaaaaaacattgaaaatgaccctatgctgaccggagatagactgccacaccgttgcagtgcatcccgaataccaaggtaaaggtgtcggggcacggcttatgcaatggggaatgagcgttgcggagcagctgaatgtaccgatttaccttgagtcgacggtggagggagtcccgttgtatcaaaaacttggcttccaaactctctcggaggacatcctattcaagcctgaaattaccagggtcgacaaggaggttcgagcaccactcatggtgaaaatgcccatagctgcgggaaacatgacatttgaggaatgggtggaggacaagagtccctctgtgaaagctacataggtatctacatattcttttagatgttcaatgcacatagatgccacatgccgtattgcatgccaagatcttatttttcgacgccaagagaacctctcatgtggtgagaacactgtagacataccttccttagcctacggtgtgtaaaatgtgtctcggaacctaagtttcccgaatgagcgagaactccgaccagttccggagtaatcagatggtaaaactggccatcccttttccattagtcttggtaaggagcctagaaattactcggaggcccaagcggagacggacagccaaagccaagacttggcgtattcttggttattaaatgtccacgggtgtggaaaccttttatcaatctaattattattgagtcaaaaatgacaacaggggtactcttttgtgcggccgtcattccctgacttcaactgaaatttatcgtatttattcaatagcagtttttacatccatgtgggctagaacattactgtggagataataaagggtctgtacatcttcaagggattaagggattggacctccaaggaacatgttatgaagtcgtaacatacggagtactccgtactataagcgaactccaccaggaccacctcggcaagtgtcgatcagtccctggcgtggcgtggcgtggcgtgcattaacttttactgataccgcgaaatacctgtgataccaagcggacccctgtatcgtacggaaatatcaatgtggggccgctgatcttatctgatcaaggattatcagatggcccacaaacccgtctgtatacccatggacctagactaccaacctgaattcttcagttctctaggcgatcttaataacgtgtcagcagacattaaatcactcatatcagagagtgaatgggctggccgatatcggctggacgcggggatttctgaataattctagtgatatatttatttgagtttgaaaagaagcagcatttccctctttcaggaaagttgactttgccatgcgtctttcttccgcctttgccgccctttgcgggctccaagcgacccttgtcgttgctgagaacaccacttggccctggcgaaccttcaagtccagccctcaccagcctccaagtctccaaatctccaaatccggacctaccagccccggatacctcttctttgaccaatcatggaacgcacatcagtacggtgtgttcataatgtcggacagtaatgagcttgtttggcaaagcccgcccggtgatctacaggatttccgagtacagaagctggatgggaagcctgtcctgacgtacttcaacggccttggagtcccagagccgttcggatggggatacggcattgttcaagtcttggacgagtcctatcgaagtatctataatgtctctgtgacaaacgacaactacaaggccttgggcagcattgacagctcctctttcgtatcatggattgacatccacgagaatacaatgacgtctgatgggacaatgctggtcaccggctacaatgtcacccaggctgatctcagttctgtgggaggccccaagaacggttggatcgctgactcgctcttctacgagatcgacgtcaagaccaatgagatacttttccgttggagtgccctcgaccatatcaatcagattcccttggaacatgtacagccattctaccctgttcgagactggggacacaacagcagctctccctacggctactttcatatcaactcagtggacaagtttcaagatggaacgtacctcatttcttctcgttactactgttcgctgttcaagatcgcgaaggatggatcggtggactggacgctacaggtaaataccgtctccttcaagtgtgttaaattgtggcccatatactaataacatacgatagggtcaaggtggcggcgactttgaactcaagggaatcaaattcagttaccaacacgacgcccgcattcgtgacgagactgaaaatgcactcattcttagcatttttgacaattccaactccgatgtccagaacgggactgatcacaccgaaggcatatttatgagcgtcaatctggccactcgcgaggtctcccctgtccgaactctgcacgatcaacgcgatgagatcttttcgacttctcaaggaaacacacaattactacctgcaaatcacgttgtgatgggctacggatcaaatcctaaaatcaaggagtataatgccaacggttcttgtatcatgactgcccagtttggattcgatggtgtcgtttcaagttaccgagcctatcgctccccctgggtcggcgttcccgcaactccccccgatgtattctcttgtattgagaaaagcagcaacaagaccaatgtttatatgagttggaacggagccactgagcatcaacagtggaaggtttttgggggcgctactcgttcagaactgagtccggtcgcgatggcacgaaagacaggatttgagaccgtggcgagcatcaaaggatatcttggatatgtccgagtggaagctcacggcctggggatccagaaaggcgtttccaaaattgtacccgtgcagagtcagtgttaggtttcgcatatgattgcaatatcttgtaattttagtgataatagacaatgaaaacgtggactataccagtctttctagagtaccattttcagcttttatgagagagcaaacttctacatacttgaatagtgcttactttaggtgtgatcctactcgattacaagctcctaatcatttagagattgtcttgagcgagccaaaatttagaaaatgatgatgtactcttcttcggttctagatggttggtattaatcgcatgacacccaactaattagaaacattactacctaccactgcactaacttcaatctgacccccataaacttcatctgccgacttcacacttctctatcaacagcatatcaacttaaataacgcggcccctgacctgcttaagatcctttatcttgatatctctccacatcccagcacatccccaggcaactaccagcagacaaacactggtcaccagcatatatcgctgcgcatctccataggcgtgagcaatagcattccgagttgagcttccccacggatacgacagctgggccgtgatatcggaataaaccgttgccatattcacatctgctggcaggtatttggtcagcgccttcgggaattgactggtccagatagcagcagacacagttgatccaattgcactgccgatgctaccgaatagatccagcatagcaaggacaacagcaatgtgctggtgatcggaaggcgccatcatagcaagctcgccgcaaataacagtggttccaccagccacggcaacaaagatttgcgtcatgcaaatatacccaatattcgtatcgggctgacggaatttgatcatcagcccaacgcctagtatcataagcgggaaggagaagtaaacggccagccatttgaagcgaccagtccagcggatcaggaagccgacgaggagacaaaagagacaggaaccgactctgtaaatggctgagacataactggcttctgtgacatccagaccccaaacaacctggagcattgatgtgaaataactaccccagaccattgagttgaaaaactcaaagacgaacattaaccctccgaagaagacggttcggtccatcagtaaattgaatgggatgaaggtcactggagcccagaatcgctcgtagacggcgaacaagatgagcaaaaggcctccaaaaacgatcatgcagataatcattgctgaccgccattgatccttttggtaagaccagaggctgaatggaagaaggaacaaggccattcctcctgccagaagaatgattccaatcaagtcgatctctatgcagtatttcttcaatgaagcaaaggtgacatggccatggctggacgcgagcaagcccatcttcttagcctttcgctgattccagaagaacagaagacacagaggtgccaccacaaccggaacgataatagtgaagattccgaatccccatcgccagccagggcctccgaggacactctgggagattggacctccgatccaagtggtgatgacgtatggcgaagttgcaaaagataacatgagggctcgattcttcaatgcagaggtgtctgagatgaaaactgtcaaacaatagctgactccttgggatctagaagttgttgcagttagctaggctgttcgaaagacagatatttcccaaatggttatcataattcataccccacggatgagaaaacctgcgcagctgcgtatgtctcaacgttgttgcatgccgccatcatgatgaatcccacaacccaaatgatcagcatcaaactcataccctgaggtcgaccccacgagtccagaatctttgccaatggaattttactcaagcctccaatgatattggccatgatactcgtggcagccgtcaaagaatggagcctaaaggcactggtcacgtatgggttcagagaacggatgacgacctcctggatggaggtaacaaagtagataaaccatatgcttcacacgtaaaagtcagtgatttgaatgaatataaacattggatcatggagagattctcacatcacatatgccaagatcatatgagacttagtccacacggccgcagtggcctgaacacctttcacaccagcctgagcctcttgatcaagagagtcctggtcggagctgccatgatcctcagcggtatctttcggtgtgtgggctgtctctggcgctttctcggagggatagaggacttcagagcccatctcgcgagcgatctccgtttctttcgatgccatggcgaaagactctacggttcgaatactaaactggctaaaaatcgccgatcagtgggatatatatataccctggcatatcagacatgcattatccgatatcggtaataggaaagaatctgcaccaatgagtgtgttgactcaaggaaagtgtccggtaagtaataatttccattgccactagggagattagttgaggccgagccccttggcgcgcctaagcgtcgagaagatgggtccataaccatccctgtaggcttcctcggcccaataaactatgtcctcgtgctcgagtatttctgatgccactccgggactattcgattagcccatcctagactagtttcttcttacctcttgccctattcagaagacatctccggtcaaaccattctcgagggtggcgcttttcttccttgtcgttgtctatggtcctagtggtattttttgttttgcggtattagaaaaaaataaacttaaattacaaacgcgtatttgagctttacagcattttccgtagtacttttgccctatctctccattaaaccatttcgcgtgttgcgcttcatgtgaatatctctagagtaaacttcttttcttgtcggatgttgatttcctatttgagctggcgttcctttcacatccccgaagctgcagccttggttcagcaactctcaacatatcaatatcaacatatcaatatcaagctgagaagagactcgctagcgtactggaggagtcattgcatgccctgttagaaactcagtccaaggatgctttgagtaacgagcctgagttgtcgaggagtgtgtctaggctaacaatatttcgtttcatgagttgctgattctccacaagtgtctcacttttgctaaagtccctagtattataatgattttgtgttccttttccgtaaaaccggatttcatatcctgtaatgaaatctaccgatacatgcttcccatatacctactccaaacactagaacactagaggcctctagcttccgacgcatcctagttttacgaaaacgagcccaggaacgagggtcgagcaaggcctttatctgtcacctgcacagataaaactcactcaaatttagtggtgtctgtcttgaattccgatactacactccgaggacttccccaagaactactcgcccatgcagtagtgaatattgccattgtgcattgtatattgaagagggttatttggaagtcgtggttttgatttcgacagtaggctttacctgtggctcgattttggaaacaaatccatctgggaattcggtattcttgtaatgcagcttcactttttttcagctgaaggatatggttccagccgaatctatagccaatatctgagaggaaagcccatacgataccagatttcgccgccagcgtagaatcatacgaccgaaagcgtcgaaagcctctcgaatccgatccttttgaaacataaccagcaagacaatcgtaataatctctgccatcagcggggtggagaaagcccaaaaaaagcgtcgaggagctgttcatattacggatatcaatatgttcataccgagatagctagtcacaaacgataacggcataaacaccatagtcacgatagtgaaaacaaggatggcttttccctgagtctttctatcgcacgtctactccgctgcacgtctggttggccccaggtcagaacttgcgtaagtttctcgcctcttatgataggccttcacgatatgtgcgccggtcatgagtcatgaccctcatcagcaggtcctgaaaggcatcaatcaaactctctattagctgacaccccatgctgggtctgagctgcccgtttgcaagcttgtcattcgactcctaattaccatagtatgaggcaaagtacctttttaggtgtagtcgagtagactgatgcttctgaacggtctctaagtctaagtagtaatcggtaaacgttcactgagcgttcactgaacctcatcagttattgcattctataattctcttgcatgatcaacctaatacatacgaccatagggtgtggaaaacagggcttcccgtccgctcagccgtacttaannnnnnnnnnnnnnnnnnnnnnnnnnnnnnnnnnnnnnnnnnnnnnnnnnnnnnnnnnnnnnnnnnnnnnnnnnnnnnnnnnnnnnnnnnnnnnnnnnnnnnnnnnnnnnnnnnnnnnnnnnnnnnnnnnnnnnnnnnnnnnnnnnnnnnnnnnnnnnnnnnnnnnnnnnnnnnnnnnnnnnnnnnnnnnnnnnnnnnnnnnnnnnnnnnnnnnnnnnnnnnnnnnnnnnnnnnnnnnnnnnnnnnnnnnnnnnnnnnnnnnnnnnnnnnnnnnnnnnnnnnnnnnnnnnnnnnnnnnnnnnnnnnnnnnnnnnnnnnnnnnnnnnnnnnnnnnnnnnnnnnnnnnnnnnnnnnnnnnnnnnnnnnnnnnnnnnnnnnnnnnnnnnnnnnnnnnnnnnnnnnnnnnnnnnnnnnnnnnnnnnnnnnnnnnnnnnnnnnnnnnnnnnnnnnnnnnnnnnnnnnnnnnnnnnnnnnnnnnnnnnnnnnnnnnnnnnnnnnnnnnnnnnnnnnnnnnnnnnnnnnnnnnnnnnnnnnnnnnnnnnnnnnnnnnnnnnnnnnnnnnnnnnnnnnnnnnnnnnnnnnnnnnnnnnnnnnnnnnnnnnnnnnnnnnnnnnnnnnnnnnncgccggtgagttagtagttgggtgggtgaccaccagcgaatcctcactgttgtatgttttttgtttttatcgtctttgcagcaaacaataaggctttgaagtcatggaactaaggcataagaggaaaagagtgagattcaaacaccagatgtgcttcgacctaaagtaagcacaaatacccttggcatatgcagacagccccaaatgaggaaattgatccctatcaattcctggttaatgcccaacggcatgcatgggcattttggaggtcttgtttgacgcctcgattcgcgacctagttaccccacataatcctcagttctgctaacagccgtctcatcgagttgctatgctttggtacatcagggaaactcaacttgcacacaattcctgccgtcggcttgtcacggatggagtcacccaactggccaacttcgcacgagagcttcgaacgtcggggtccggtattatcgtggaggaagaccttgctgctatttttgagcgagggcggatttcacctgtgatcgagagtgaattcaagaagaatgtcaacatctagaagtttacactgctatgtcatagatcagagctcgatttggaggagggaatggggccgaaaatactgcgagcattccaggagcgaaagtacctcgcgaccgtacctacattgtcgatgctcggttgtttatattcctctcaaaccctggcgaggatgatttcgaaatccatgactatacgtttcaaggtgaaggttgcggatgccacggcggacccgggtttgatggtgttatgaacaagctggtggcttgtaacagtcagtccacggaattccaatgatctatataccgtgagatagtagaagacgagctacagaagtccaagtccaaaagaccatctatatccttcaaaacctcttggtaggatattctgatgcacgtacactatctacgtaactgaaaagagaggagttatcatcccatatgtatatgtgtaagattgattgctgatgatctagctactgccatacctttcaaataacttcatgtggacaaagacacaaagtgcttctgctctgggatcccggggagacgtctctgcaagatgcgaaaagggatctaccgtaccacgctcctagatatctggtaaggaggctgccaaagagagacctgcctagctgcataggagtacccaacgctcaaatgcatcagatcactcatataaggatccccccaacagggagtgccatgtggcctaagcctacgatgaacttctccagctatctcccaatcaacgaggcccacgatcttgtcactgtcaactatacagtgacacttagaaaagtcgttgtgcatgaagcttatatccagatcggaagaggatctcgcattctaggggttggatacggccattttggcgaatctttgggtcgggcacgacgtaagaccgaatctggtatccatcggtaggcttgacggagtgcagctgtcgaagtatctcccgtgcttgctgtttgaatgagtccctttgggcttgcgaaaggtattgccatgcgatggctaatgaaacgtctgggagtctttcctggacaattattgggccgccattaatctaatgggatttaagtactataggcgcaatcaagcagcgagaacaagtaccttgccagtaaagtaaatatcgggcactctaatatctttcaagacattcttcgcaatagcaatcgcctggatctcattggtgccagcatacgagtagtcgatctctatatgctcggcaccttgcccgtggaggtggctcgacttgacgatgatactaccaagagcgaacacgtcacgaccaccttcgtcagccggatatattctagcagattggtcgcaaagcctggtaaccgaagcccattaatccaatgagtctctggactgatttaagaggccattatctgttctctcgttttcaatcaggtgctccggggaagttagtcaccctctttcgtcggagttgtaatgctcttggtgcttctgggcatgttatttcatctactaggacatgtgctctaaacgtgagtcgacagttatatatatttccgactaatccttgataaatatctcactttcattgcccagaatgaagagatctctttgtagcatctataggtccatcttcatcaatagctggcatgatagtttagtactttaagccatactaacttatttgatcctattatctacatctactatccacatattcgaaatggcatcgaaatgtcctctctgtcgtgaatgagttaagacgagcagtgctccccatctttgcccagtcgagaaaatgccgaacgccgagaaaaagctaccatcgatgttggtggtcaagcaacagcaagacgttgtcgtttttcatgctgtcccgatctgagctgtcagactatgtgagttgatacccgctggaaatgacgttgtgaccctcattaatgcttcaaaatcccagattctcaacagcttggtaatgcaactagaatatgccacgcccgaacagagaaaaatgagagcttgcgagttagcagggagtgaacttatcattttatcattttagccttgtggtgtccttgagccctgttatgtcattagttggaggacgaagacccgtggagtgcctgtctgagcagaactattgtagtctgtaaatagtacataggcaagacagtttcatcacctactaaacttggttgtcgaaataattaattatatcacatagttaattcaagatagtactcatatcactacaagtaaatatattccaatctgtcacggataacccagtggaaggctcaccgccatgccaattaccctgcttcggccgccaaggccagcaggaaaggtgcctggtacgaatcccggggttggcattttcactcgtgcgagtaatccacgacgctggaggccactaagcaatggaaatgacacttgagggaagcaattctgcagagacatttccaccccgggatggcgtcgccagatgacaccgtcctgttacaggcaaattggcaattttgtgggacaactactattttttttgctttttctttatatacatgtattgattgtagttagttatatctaggtctactcagtaataattattgccatgcctcttgaagcttcattctgggagataaattgagaaacaagttaaacacgctaataatagcatggtaaaaatgtacaagaacgtgagaaataaacatgaaaagaaatgataagtgttcataagacaagagaaacaaaatactcaaaccagtccatcaaggtgtccccatatgagtctcgtgcgatgcatgaaccgaagtattctgcgtctgctccaagaccacagcatagaatttgccttcttctgaaatatcacggtagggacctgcagagacaacggccctgaaacaatgccaattagcatatgacttcacattctgatatcagaaaacgcccccaaaaagagtgacaaagaaaatagaaaataaaaacataccatcccttatacttcggctgattgaagatatccgtaaacaccctcagcactcgcaacggcaactccagcacagaaggcatctcaggcccatcgccacaaatgggtaaccccagcttgttgacggggagatagatggtctcggcgacgttctgcggattgcgcgtctcctggaagatgagaaggcggcgcgaggcgtgcgacggcggtccgcctgctggcggtctggcgtttgcgcttgcgctcatgctcatcgcgaaggctttttgagtgtgtagagtacgcaataggtttttgcggaggtctgtgttggattttctttttcttggacttggtgtttggaaggatggattgttcagtttggctgttcctttttttttttttggtgttgtcttttacccgcttggacttttctgctgggtctctggcttcgatgcttagaggaagcgcgtttgctttctggggttattagtacggtctctttgcatgtagttcaccaagggcttcttactatttgtcgacagtggcgtgtagagggcgcgacaggctttgcttatcgtttggcgatcagtgtcccgattaggagatcgcggggcaaaaagggggggatttcagagatagttgtatgtggaagatgaagtaagatggaagttgaatgtcgactgttggttttaagaagaaaaataagcccaacagaagagggggacttaatgggcgatattatgattgttgtacctactgaactaataatctcatacacaacatcattgatcatgacattaattagattattcctatattctagagtctagtctcccgatgacctaggcacaataaaatcaacagctaacagagaaagaaaaagaaaacgctgggtatcatgataatgtggccgaagagaaataagcaaaatcaacaaaagaaagtcaatcccttaaaccagggatgaatcatggtatatggcatcattcactatgcagcgagatgagaagcgatatgatcaaatcaagcatcaagctctccctctagcactctgcgtgcagcatccagacgacgccgcagcacccgcgcagccttttcatcggggtccgcagagctcgtgattgcctgcagatccatacagactttaccaaggctggcgaacagtgcttccagcatctgtgtgtcatcatcgttgatgccaccgacactgggggtgctggatgccgcgcgcacggtggagacgagggacgagacaagagaggtcggggttgcagaaccggccgtggctgaggatgagcggccagtatgcttctgaggggaaaggttgtttgggtccagtgaattggtgtggtgccgtggtccacggggtgtttcggagcggtcattctcagcctcgatctcttggattggacttggctggtagctgtggtgagtatgagattgggaatggctatggctatgtccgtgtcgcagctctgtccagggattagtgtcggaaacgtgaggggaaaagaatcgcgggaacgcaccatggttaaaccgtcggtcccagtacatcacgctgtcaacgtcatcctcgtcatcgggacgctcgccttcgtttgcggtggcgaaggttgccacggtcgagacggacatgttgctgttgttacgggagtgccgctttgtgtatgcgggccgggttgtctccactgatccgttcgagctgttgcttactcggcggagttgctgggtgtagttgcccagtgcactatgcaagatgaaatgctcatagtcgaacgcatcctcgcgcagctcgtggggcgtcgcgtccgtgtgcgacggcacgttagggaagacttccatgtcgctttcgaggtcatcgtcaagcggttcacgtaagatctcatccagagcttcgcggtcaatttcctcattaaaatcaccttcttcggcatcttcgtacatggtctcggcgatagattggtcatcgccatagtcaggctcattgccctgccaattctcggcgtgcttggatgcatttccagcagcgtgctcggcggatctgcgtcgatcttccgccgctatctcattcgagacatcccgagtgttttcagagctggcttcacgtcggggattggagccacgactgctctggccatctctgagctccagcgcattcgcataccagtgatcggcggccgtcaaggggctgggcgttcgcaggctttgcaaactacgccggcgaagattgtcctcctgattcttcaccttcagagaagagattttgatgtgaagccccttcatctgatactggagatcccgcacctgcagttgcgactgcgcgcggctagggggaccaaaggagctgtagactggactgaaaccatccgggctcgatttcgattcctcctccgaggaaatgcccaagccatgtggcgagcccgacgaactgtcttcggtgaaagcaggcgattgcgccccttggccctccttctcctcttgcacatgtatcggaggctgggtagaagaaatcgatgatcggtgcgtcagatacgccctcgtaggtgcatagtggaacgaccgatcatcagtatgaagactggacgaagtgctcgcgcccattgcactgacagagcgcgaaacttgcttgtcatcattcgagaagctcgaatccgacggaacaatcgtctcagactgaccccttgaatgacgattattcgtcgtatcctgcgacgtaataaacgactgccgtcgaagcgaaaagctcttaggatccgtgcgcgaaatcgaccgatatagtacacccacaggctggtgcaaacccatcggctggatatagcccgaattcgagggcgagggcgatgagggcgatgaggtcgtccgcggcgtcgtcgaccgagctcgagtgagattgttctccataagctgtggattcaaaggatgttagtattactccctagacaagcggcaagctgcggcgcgtaagaaaagaaaccaacatacattcaagcgtttcttcgcattctccaaaatcctttccgcctcgctactcagtatcgccgaggaaaactcctccccgggccccttgccctctgcagccgcagacgccaccgcgctactagcaggcacggaagagccccctgcagttccaatgaccgcggtagcttgcgctctcgcgacctcggggtgaacgggagattcgtcgcgtccgttttgcgcctcggacacatccctggaagcggaagcgcgtctgctccccgcactgattgtggaattggagctactccactccctgtttggatcatcctgcccacgtaatagcggtgagctggctagctcttgctcatccgagtcgccgaatccctccaatctggcgggcgagagctcctcgccgatatctgagagacggcgactgacattcacgtcttcgtgtgtccatgcatgacgggaaaaatttttcttctgtcgactggatgccgacatggaggcattgggatccgattggttgcgggagttgaagtacgcgatttggggtggggaaggagtttgggattcgcgttcgacttcgtatggtaggatcatgtccgggtctgttagagtgagtgagggcatgatttcgctctctcaggccctggggcctgggggggttttccgtgcagaattggtagaaagagagagaggaaaagggttgaagtcgcagaatcgtcccgtagacgggttgggtaccgttacagttagtttctccccttagacagtttagcgtgccctgatcattgccttattgggatctgtgaagatattcccaatttcctgtctcatactctccgtccggagtaaaaaataggggattaggcttcgactacccttgcaattgtcaatcgtggtagtttaagtagtattaggtataaaatagttagcgggtgatagatcagatcaatattagactatatacggagtacggaggacaccgcgagaacaataggctttctcgggttataataataaaattacgtagaaaaatgtctatgctttagtctctttctttaattaggattgtctccgactgttcgagccatacggtgtagtcaaagagacatggccttgagatgtgatgtatacctatgcatactccgtataggatgcattattgctgtaaggatatgacacaggcattttctataatttttaattgattgcactatatactcacagtcagctgagtatctccaagggtcctttgctatggttaaaataacaatggaggaacccctgagatcggccagccatatgcccaggtgagtctaagttccacaccggtggagattgtaatttcagggacatctcaacgttcattagaggaaaaaagatataaacgttgagaaaaataagagaaaagagaaaaaaaatgtatgctttttgtatacaacgtaattacacatgccataatcccgtagaaacgcttatatctagatcttcgatagcaacaacttcgcaccactgctactcgggctgggcttcttctttccatccttctccacgactaacgccgaggcctgctccagcgccttcttgttcttcttcagagtcttgagcagctcgctcttcttctcaaagtcctccgactcagccagcgcgacaataacgaaggggttagcccccgtcgcccagtctaggatctcatcctggatctgcgcgtacagcacatcgtggaagttcaacgcaggctccactttctcgatagacttcgaggccgggttgaatcgtccaccctgcacaagagacttgagaagacgtcccgcgtgtgcggtatcgcgggcttcggtgtgcgacttggcggcctcggccacggccgcgagagcggcggtcttgtcgccgtcggcttcgaacagcacctcggagaggaactggcagccgaaggtcgtctcgaggagggtagaggcgcgggcagcgatgaattcgagcagtgttggcgaggcggccttgacgagttcctggcggcgcatggccgggtctttcttcgaggtttccttgcggacctcgcggacttcttcaaggaccgtttggtcggcctcggggagaagccacttgacgcgctcaccggcgaaggggtatagcacagcgatacgtgcggtcaggtcgttgacctggtagcagagttcctcgttgcgggcctcttcggtttcattctggttcaaaagctcggggaagaaggacttggcgctaagttttgtgtcatcaatgacctcgtacgcggcaagaataacctggtgaccgtagacgtcgccagccatggccttgacgatgtcgcggaagaatcgtataagcagcttgcggtctttagcgttggagtatgcaagcataagacacatcaagcgggagccggactgggtgaaagccaagttcttgatcaagtcaccctcttcgtcacccttgatcagctcgataaactcattcgcttcgttgctgccgggttttgtgcagaggaaatattgcaacatagcatcgtgaagcatggtgaaaccagtgctcttcttctgcaccagctggttaatcagctcgcgcaagtagttcatgatcggtccacgcttctcggggtgggcttcgatgatcttcgcgagatcggaagtggtttcattctcatcttggaaaatgacaaactcgggaccgtaccactcgcggaggagtctggccttctgtgccctggtcgcaactgtgcggtagatgtcgtcgagaatccatgagccctcggggtggcggatgagacgtctgacatggccgtagaactctgggatgatcaaatcgcgggtctcgtcgtctccgtggacaatcaactttccaaccaagaacttagcatatcgactttgcgccagctccttgtaagtgcccttcaactcgtgcgcgatcagtttgcgctgctcaaggtttccgtacttgagagcagtctgaatgactcgcaccgagtcgtgcttgaacacgaaatcccgaacgcgggtagtgatgatctcaaacagctccttgacgagcttctttctctgctccaaaggcacatgggacttgcggcgcaattgctcccacaatttcttggagcgggcgacggtatcggcattaggctttgcggccttgcgctccagctgaagtgctttttgcttgaggtgggattcgcgagagtctaagcgcacaataatgattagatgtggcatcgtcaacgaggcataaatgaaacttactgttggggttctttggggcctctttctgcgctctttcctccgcattgagtgttctgcctgacttgggcttctcctcctcctcgctcacatcgggcatctcagcatcgtctgaaagggcatcaatatcttcgtccgagacatcgtcaatgtcgaagtcatcctcgtcttcggattcttccatctgaaccttctttgatggcttcttgtcgctcttgctggatttggggtccttcttggagtctttcttggatgaagagctcgacttcacggacttggacttcgatgcggagccttccttggtcttgctccgcttgccattgcgctcttcgctgccgtcaacagcacgcttcaatccagccattatgaaagatgatttccgtaggctgaagggtatctccgattgaaaaaagtaataaaactggggtctttgcgagcggagactgctcgatgtcctggtggataattttttttggtcgcaggcggaggaagtttttttgccggctgtttgcacagtttgcactgataagatacaaaatagccctgccttttcagcaagttcatacatgtactagtatgtagcaatgttagtattcaaataaccatttatatagattcttacagaaatagatcgaataatacgtgtatatgaaaggacagattgctatggacgttttatgataataaaatgtaggacaatgtctctgaacgaagcacagatgactcgagtcgcaactcgacggcaacagatgtacaaaatgctaataagtgacatgagccactagactctccagggacaagatgatgatccctactgccatcgaccaaatcccgaattatattactcttgaacgagtgtggcttgcatcacccgaaacaaacccgaaacgccgtagagagaatcacaacgcattaaagatatttcatcacttcatataccaccggggggtgcaggttcgaaggaggttgctttcacagatgccagctctgatccgccgccactctggccgcgcttccgcccaggaatgtggaagccgaaggacgaggtagaagacttggacccggatgattgcgcatcattactagagtcaccaaaccgggagaggaagccctttttcttaggtttctcgtcatttaatcctacttcttcaaaggcttcttcctccatgattccagacttggtaaggctgatggactgagtgcccgatggggttaatcgggagaaccgagagtcaagagaagttcgagaggggccagcatcaggatggatgatgggtgagcgggcggaaatatcctagattgaagggttcatgtcagtcgggtttatgcggatcggatcgggtcgcggggcatacaaatgatcggcggtaagagtcaaaggactcgcgagagatggagaacggctcattctcgtcaactagatctcgatggttgatggttttgttggagcccgggtatcggcgccagaaactcggccgctcggggggggaaggctatcacggtaattagcaggtgtatcatacttcccgatcacacacagcctgtaccggaagatagacgccgctgtcgttgaccactagagaccgaagtcagcattgcaagcaagtacacagccacacatagccacaacggggattcgaacataccactcaatttgtactcggtgggctcatcctggctattgcggatcggtatgggcgcaggacgttgatttggagagagatagttctcatccacgggagcgggttcctcattgggttgggactttcgtcctagaaagttacgaaatggaggcatggttgaagaagtcaagtgtggagatttcggtgatttcccctgtgaagggtcccacgttagggtgaaagtgccccccgattctggagcctacgtcatccaagaagtttgtgaaataatgaagaccatcagccaatcagattggaagaaaatataagaaatattacataatcttgtatctgccctgacccagtccctgatttatgtccaacctcggcgcacatgcacaggaactggtactctacataaacagactacttctactcaaggaatggattaaatttgcctcatacattcaagcctaacgaataaagctttagagctacaaagatcagaagaagaaaaacatacccttcaacacctgcaaacacccattgaaaaagatcagaacattccacttccatggatgccttcgatatgttccatcgcagttcgcttcatgaaaatagatccacctgcgaacaaactccataagcaaatcaaacccaagaccggcctcaattcagaagctaatccaggcttggactgatgccatgcatttcgctatcactttcgtaacagtgagtctcaccagcaattgacctatactgataacgcaaaggacgaaaaaaaggtgactcggacattgtttgttgttgattcctttttgtttttttattgtgcttttaatttttgggttgtcagaagctaagtggcattgttgggctccagaagattggcactgtggtggcaatccagagagcgcgagtcggatgggtcgaagacggcgttcttgcgctgttcgatgaagtaggctgtgcagaaaaggaatgttagttaaggaactccaaatatgtgcaaatcatgatacaatgtgatacgacgtacgggtcagttgaatcatatcaaaccagcggacggcgttctcgtcactgccgtcgactgccttcagtataccattgtccgggcggaaggtggccttgggaggaatgtggcgcatgcgcaagagcatctccaggatgtcggcgaagcggtcagactggttgaagtagtagggaggacgcttgtcaaggggccactggatggattgttagtgtgaaatgcatcatggaagaataaacatggaccacttacgcgctgagaaaagttctcgttgtcccatgagcggaacagccagcaggtgcgttccacgcagttcagcaggataatagccacaatgaaagtatcgaaccagccgcacttctggcgctgaaggagtcgacgttccaaatcattgataacaaacttgctcagctgcgaggcacgcttctccatggcggcgcgcaactgactgcagagaagtccatatgattccgggtcagagacctcctcgatgggcagacggccctcgtccgatggctgagaaagagagtgcaacgagttcgggggcagagtagggttgtagtaagtcttccaggtgagttctgtgtcgacgagaatgtgggtcgcgacccacagctccaacacgcgttccagaagaatatcctgtatctatgtcaatgcacgttcccacgttgaatatcagaaaacataccttctttccctggctgagttcagccgcaagcagcaaagtgggcttcatgaaaggcgaggtctctcgctcgtagaagtaagaagcattcttcttaatgtacatctccaacttatttgggatgtcatccgagtccgcgtccaggagatagacttcttgcgaaggaccagagaactggtcatctccgagggcttgcaactgggggtcaagtgcagacactgaactgcggtgaccctgcagtccactgaaagtcatgaaggaattgctctcctcgaagtgagtaacttcaatgcgaccggagtagtgttcaaacttgatttgatttttgatgctgttagtgtcatggtaggcaagggtagagttgagatctaaagtccgagtcagtatatattatatcttcaaaaagaagagaacacaaaaaacatactcgcattgtatagttcaaactcatcggaaagacgggtgcgcaggcacgggtgcttccataggcgggcactctccacgctagcgcaagttgtgcaaggggtatcgccagagcactatcaacacttgtcagtaatattcacttatctcacacccacacaggttccaaaatccatacaggtttcttgagcattcggcaacgaagacatgcacccttcttccgcacgtcttgaacttcacggcgtcgctctgcggtgaaacgcccccgcaccttgggtttcataggcttggttgagttaccaaactcgttcacaaacccttttgcctgggtatttgggttcatcgcaatagggcgggggtaagatgcagcacgctgagtggcagcagtcaacgaggggtcatgctcttgcaggctgtcgaaaagaagctgctcatgtgtggacagttgattccattggcctagcttcatatcagagctaaggttatcactgtcaatcgacattccttgagggaccatctcattggcggaggccgcaatcatcgacagctgtgactggcgcgcattagaggtagaatcaggcgacatggacgcatcaccgaggggcggagacatggatgcagggtgctcgcccgaagtgtgacttggaagggcaggtatactaggagcgttggacgattggggagttcctgcaaattgttagtggtcaaaggcgtgcaacaatgaacgaaagaaaaacataccctcggcatttgctgtaccgtccatcttggggtcagacccttgcgagtgaccttggaatccctccgcttcaagcgcaggatcaacaatcacggtcttgcctccagctgtcacagactgggtgtatccaggtccgcgcttggtcacgtctgaggcgccgacctgtcgcgaggcttcggccaacacgttgagaccgtcgaagttctgtcggttcggaaatccaccttcggcagacttgcttttacctccagcaggggaatctttattcgagtcaccgtcggtcaagtcggggagttcgtggagtcgcaacaacacgcgttggcggtcgcgtaggggaatcgcctgacattttttcaccagatggttggtaaggctgtcaatgcgacccttggggaacacttctccgcaggctttgcacgtatgctggtagcgattgctcgcgtcttccagcttgggacctcggtggaagaactcgaggatgagttggttgggtttgcgacccattgtgagggatggccgtggacgtgtttttggaaggttttcacgtgtcgtttagcggtatagtgacagtgaacagtcggccagagcaatcgacgtgtcgctcgttcagactaggcagtgtatcccgccaagctgataggtctgtggactcggattagaaatggggaatgtgggatgtgggaggaaaatcacacacacagtcacaaggactgcaaggcccaggctgtgaacctcagataggaccagtagcctcagaagagactcgaaatggaatttagaaaaacgaatctcgagatgatcgagtcgatgatgtgcgggcaaaaccagggcagtagagggcggtctgggaatcgcaaggggaggaacacgcgatggaagcttcaccgcacgaaaggcggtgatgtcttcaaggcggtaggagaaaggcggtgatgaaagaagaataaggatatctcgatatcaacttggataggagacgagggaaaggatgagttgttacgggatggggttgaagaagagaagaggtgagaaatggagggagaggatttattagtcactttgtgccactgtgactgccactccctctctctgaatctctctctctccttctgtatggaaactctatatatggggagttatgcaagctgtatcatttctttttctttttttctttttttaaggggttgataatatgtgtctacttgatacctagcaatacaaatgactggcatacatactacgcctacatgttggaaaacagccaatctaagaatatcgtcattcccgtgcctatatttcggtgcttccccccggggccccaaacctcaatttcccccttttgtgtatggccaatactaacaacactcagaactgatactctcatgaacctatggatggaaccttcatgctcatcaacaaatacggtgctcgggaggccgccagggcacacccaacagagcaaagatccgacgttcgttccggccctcaagcagccgacccccattcagtttcacttgctggttccgaagcacatcggtataaaggcccttttggttcaagcacatgcctttcttgcgtgccagcagtctcatactgcggttgaatatatcattccccgtaaagtatatcaacgccgctccgatctccgcatcaggaacgaacaataaatcgatccgacgccacagggtggtgccaggtagggctgatgcaccgtgccatttagatccatcctgatgcgacgagatggcaaggctagcctgcagaaagccactactgaacaatctaggtacaacaagaccgagcatcgtaatgcggatttgctcaagcgaggcaccaggtttggtgatcagacagtccacgtccccgcaggtgagtgccccgcggcggtaagagcccgagacgatcacctgcatatccctatccacagcctgcaccgcctttcgcacgatcgccccgtgggcttcaacctccttgcgggggattcgttgcgcgaagtcgctgtggcgttccaccccaatacgctgctgtttagtcaatggagctctttccaataaatccttcagagacctgtagccctgtgcgacccatttggaggcctggggaaggccagcaccatagacgccgagaaattctttgattatcaggtcttctggggtattattggtgttctcgagacgacgaaggcggttagtcatgacaatttcttcgattttgtcagccaaccgctctccgataccagggatggcccgagcctgtgttcgcgtaacaatcttgtttggttgctttcgcaaagcgctgatggctttgcgataggccataacccgccactggtctgcagtctgggtgtagtattccagcatttgctcaagtacctcaatggttctgctgtttgggacgtcaagcttcgtgtccggatcgaacttctgcatacaggcgaaaccttttgtccagtcggattttcctttgcccttgccttctccggtggatctttttggtgttttccaacttgactcctcccctgagctcgaggtttcgttatcggaagcaccagcagattcgtcaacgggaaattcgactggatccagaggctggttgtaaagatcagttctgtgaactttcgccgacggggaagtagttttaccaaatgacttgtggccttagcctcgtctattatatcatccagtgcatctcgctcccgacttcctcttttacaagcttcttcggctgcaggttcatggaccggttcagagatcatattattgggcacactttccggtacaatttctggtaagtcttttggcaaggagtttggcgtcggtttcttgactggcgataagcaacgttccggagactggtttttctcccgccgcgatggtttcaatggaagagaatcaggaagtggtggttccacaactggagacttctgcttctcggcagtcgttggagttccgttgggacgaaatcgaaggtgcgaggtatcaagaacggaacgaaactggatacattcggatggatatgattcattgacaagagcgacattcgtctacagcggttaatattaaagtctgggtatctcgtgaatgaacctactggcaaggattcaagtttgaggtagttaaggagatcggtcaataacaagttcttgtccataatcacatgagtgacatcggtagcccaattttgactccatcgtgcaccataatcctgcgctcgttgaatgcgcaatcgtcggaatggagatacatcgttgtttgggaagaagactggtattgagagttcagtgagagtaggctgtgggatatctagactacttacaaaagaccaatcccttgaagatctgctggtcaactgggattatcttagcattattggtctttcttttcttttgaggaggccctgcgctcttgatagcaggcatagttccagctgtccgagggcggttcgtaggggcaggcttagcgacagcgaacggactgcctctcttgctttgaaggtcacacgaagatatagggtccgaatttgctcgaatacgctccgcgaaaggagcgactttgtttggattgggtttgtcgagtcctttgtctgcagaagttagaagattcccccagctatcatcctcttcatcttgatcatctgagtcatccagccgatcaagagccgtaaaaaagctctttttagttggaaataggtccttcatagtaggctagtccggattccaatggaggggcggctgcctacgccaggggtggttcattatataggctagacctcgggggtcactgttaccgcacatccatggatgactcgagagcaatggaagcgtaatggtccgaaaacttccttgggccactcggacccgtggatgcgagacgcgattgactggcgcgaaatgggcgccaagtcacgtggcctaatttagatattcacagagtgacctataacgaggaatatcgaatccgtttggaaatagcccccttgggtagacctaggtggtaccataagttatcattctaaacatgtatttcacgatctattacctcccaataatagaactagcatcgacgactattcccaaattggaaatattatgtcatgtgactcttgatttccatggaagatcaaatgcgcggacaagttcgaaagcaataacctcacaatccaccaccctacacacggcccgttgactgatagaccgtgagccaatatgtggaaatccgccctccccacatttgtggccgacctttccctcctgcagactggccgctgtctaagctgccaattccgcaacccagcaactctctcccagctacggaccaaacccttttctctgcgccaatattccagcaagcccgagaaaccaatcgacacaaaagaccccgctcctgtgaaacgaaacataagaaatgaggcacaccgcctatcgactgccatcgaattcaaacagaaccagtcccaggatggacctcagcctggcgacgcagactttgttcctccaagcctagatcggcccatcggtagcccgcaagcacccttagaaggacagaatacaggtattgacacgcggtccttgcgccagcggcgcgacgacttcaccaactatgaccggcacatcaagcggcgcaaggaattgtacgattttgcctttcccccttctcttcttaacaccccgggatatagcccaaatccggaaatagtagggctgataaacaattgcaactcataggacaaagcaagtcgccaagccgtatttccgcgaatggtccaatctccgcttcgccgagggcaagacctttgtctcgaacccgcggctcttcaaagccgacagagccctttacttcccgaacatgcgcggcgtaactttggcaacgcccaaggacccccaggacaccacgacgcagctgcgcggcagcatctctgttgtaaacttgttctcgagcgtgtgggctgagagccaggttgcgacgtttacagggccagagcagaacccggcacttgtggaggcgatggccagcggaggaaaaatggtgcagaggattgatatcaatctcgaggagaaccggttgaaggcgtttctggtgaagatgttcatgtggcggatgcggcagaaattgcccaagcagcagcattcgcgctacttccttgtgcagaagggtttcgttcaggcactcaaggagaccattggcatgatgaattctaaggtcggctatgtttacctggttgattcggagtgtcgcattcgctgggcggggagtggaccggctgaaaagtctgagttggagggactcaatgctggtgtgcggaagcttattgaggagaagaaggatgttctccgggttcaggatccatctcgcaagtattgattaaggttgtgatgagaaggattacctgaactggagcctttgatgtgatttcattccgctctcggttggatttgtacatacaatagagaaactgtataatagaaagtataaataggcgccttcgagaccctttcacgagaattatcatcgattctgtcgcatcccccatcaagggggactcggaacatgcctaaacccaaacgccttcgagaaatccactcgctagagagcagcaatcgacataagaacaataagacatagggacggcggtgtcactgagctaccgccggagcctcgactccatactttaccggaagaacagcaacatcaaaaagcagaacccaatgaagcatccgaggataatagcatcccgcctcttcttgtttccaatcttgccgatgagatagttcataccggggacactgccagcagctccgacaatacgccgattaatgttggcaatagtctcgctctggacaccgaagttctcattgatggcatacgcctggctcagcacgccgtccatcatactgtggctgttctcgactcggccccgctcttcaagcatgtactcggcctcggcagcggcggggttggatgcgcgataggagctgatgtctgaacggacgttagagagtaggtttgcgcggtcacgcgattcagaaatagctgcggtcagacgttgaagctcgcggcggtggtcttggagtatttcgcggtggcgggagacattgttctgtttaagggcggaggcagtgagggtggcttcggagtcgagtagacgggatagttgggcgataacagcctcgcgctgtacggtcaattagttgtcggtgcttttctctctgttacatgtcggtgaatggacgtactctttcgaggaggtctttcaattgcgattcaagccgcagctcctcctccgtgggtgacggcggaggtttggttatggatgcaaattgtgaataggtgtggaaaaggttctcggtctatcgttgcatcagttaatattcgtatagggctcctgatgaggagatattggtacctgagtttcaagcgaccgtgcttgttgccggagctgtgtccaacctgagctagttgaggatgccatggtaggcaaggaatatgtatagtttggatatgaagtcaccggagagatctgatatgtttaagagtttctttcagaccaactagtcaacgtgcaagggccgaggtgctagttaactagttacctgcttgtctatgtacgtaagtgcccatgacggggtaaagtgcgctaaccaaatacagtaattctctgccccggatcccaggcaccttccgccagaaacttcaggcctcaaattcaggctttagtgccaccgtaatcacgtgcacccgctaaagtcacaaattcgcttagccctagtcccacaaccagtcgcaaattgaccctcggacatcttcaattctcaacgtcgacaacccacacaattcaacgccaccatggtatgtcgtgctgtgctacggctctgatatcaaaatgctgatgaatcgctctttttttgcagtcgtccaaggtcaaggctggtcagctctggggcaagaacaaggatgagctcgccacacagctcgaggagttgaagttggagcttaaccagctccgcgttcagaagatctcttccggcgcttcctccaagactcagagaatgtgcgtattcgacaccccccgatatttcattttttgtgcggatgggatttgaagatctgcgggatgggaacgatcgagaacccgggccagacaacgtgcaagaagattacgccaacattcaaccaagggatcaacgaggaagaggtggattacacgatctggcagaccgcgcacgatactggggccatcgatattcgagatttgatactgacggaaatttttttttctagcggcgaggttcgcaagtcgatcgctcgtgttctcactgtcatcaacgccaaccagcgcgctcagctgcgtctgttctacaagaacaagaagtacctcccgctcgacctccgccccaagctcactcgcgagatccgccgccgtctcaccaagcacgagcgtacccagaccaccgacaagctccgcaagcgtgccatccacttcccccagcggaagtacgctgttaaggtatgatactccgacaatccagcgcaggaacaggcggaatgagggttcatagatgttcatctttgccctcgccaccaaggacctcacccgtcagacgaaccgaagcaaccgagcacaatgctgacgatctatttcctgcaggcttaaacgcagaacttgttcggatatggagttttgtgggaagacgttgctggccttggacataagcaggacgtgacagttggatccgaaagcttatggaggggtcggttttctctttttttttacatccaaaaaatggaatttgattatgtatctaaataggatgcaaatcgactcttgacatgacatgattttagacattctccaagcttccttactcttgctcgcatgtaagaccagtgacgatatctcacggagatgcatagtctcaggactcggtgatatatatttctacaatatacaagttttgtgtggtccgcatttctaatctacatggcttgagtacaaagcaaacataactgtcggattaaagatatcttgctttggtcacaagggaatctaatgcgagacatccaaataccaccccaagtctacctaagattaatataaaaatgtttgaaaaccaatatatcctcacatcctaaaatagctaacccgacattaccctcggtcaaagctagaatgcgagccatagtatccaatctcagcctcgacgttccaagtctaggtaatccggttgccattgccatttgcactcgcagtaccaatccccagaaccccagtatctgtctcaagaacccacatgcccccgcaaagacaagaccgcaacagccccagcttagcaatcatcttgaacgacagaagcgaccggggcagattcgtatcaccagagacttcacagcaacgcgcacaccggcgtttctttaccggcgccacgcgaccatcattccccaacggcaacggcgggcgcagcgggcacttcttgaggatatcgacctcacggtgcctccggtacagcgccgtgcgtcggtcatttccaaaaccaagccagctatagtccccgaggtagatcgccatgcggttgatctcggatttgagcgccgggactgtctgtcggaggagggtggccacggcagtagtgaggactggcgggatgcgcgcattaaccagcaattccttttccgggccgggtctttcggcatcgccgaagccagcgccttggtaggcgtgcttcacggctgagtccactcctgccaggaacttctcatacacgtcgattcgtaccggcgatgattctagtgtttggcagatctctgtgtagtagattcgggagtcgcctagaagagaggcggggtttgcgctagcgaaaccagcgtgcacgccgcggaggccacggcagatgaagcggaggaaggcgcgcgacatgcttgagaggaggattaggagggggagagaggaagagtttttcactgtaaaagggtgagcgaagctggagttggttattaagaggttccttacacttctgtgtgaatgcttctgaatcatcgaatacatcttcgaattcgtcggccatgtcgaagatttcgctcagaagaaaatgagagaagtctagtgtccatttggtgttacccaataccatgcgtagaacgtcttttgtttcaattagcaacggataacgataaaatgggctttctttgaactcacctggatcatgcgattctgtctggcctcccttattatactggaagaaatatgcgaatagaactgaggcatgtctgagttgaaggcttgcccatggcacggccgatgagaggttgcggcgcttgagtctccctttgaagcccagtccggcctgtaagctgagacaacgaggtatgtacggatggctcatgagtttgtcctgttcggctgtaaagttgcaattgactggcagtgcacggtacacctcgctgatgaatgtggtttgagcctctttgggagttgtcagtggatttgatattatcaatacgaaggttttcaaagcactcacctagtgatagctgcccaagagcaaccatgagtatgtcatctgtattataatcaacgccacatcctcgactgaatgccaatgtcaaagccgcaatggccgcggaaagattgtctgcatgcctcggtcagtatttttatttcataaaagtgacctgataggccatctggaagatacatactctcgtcatagagaccctccgtggatccaaatgaatgctccatcgccctcagttgcatatgtccgtcactatccagcgtgacggcaacgcaagcattaggagagaaagcaatgtgaagacctgtccatgtcagttctagccacgccactatcgtttagtttcgtacctgatgtttcgagcgggtactggaacccagcctgggccagacaggtcactgcgcttgaatcgtcaagaccgttcagaacggccattgtccgtgtgtcgtagcaagttattgagctgtcatcatgactgacagccaagactgtcccatgctctactaaatcgaccgagacaatgtacttatcgcaataaacattctccagcctccgcagttccattttgggctgaggataggtcagtatcgattccacgcaacagtcaaatatcgaggaatgcacacctttgcttgagcgttgctcttttttgacgtcacttcgtcaaacttgggatggaggatctgcggggcagattccaaatgccacctgacaatcacactcggtgggccttgctggtctggataatcatgcatggcgtggagaggcttcgataagacagccaggatccaagggttagcagtggaccccgcgaggctatcaaactgtcccggcatgatctctagtcgtgtcaacgagtataccgagttcaaaaacggcaaagactgatcgtgatggtccgggccccggttaacgttcaatatattgttaggcatgtcgactttacagtggatcaaacggaaggtggggatagggaattggccaggcagttttccctgtgccggctcccattgtggcgggttccagctgatgtgcactctataaagacacattttctggcatgcggagtaggtggagagaaggatcccagttgttttgatgtgtcagtgatggcaggaaatggagctccgactgaaagacaataccttgtgttgcggtcatggatgcatgcgttaatagtctatccgagtaccctgtgttcttcagttcggctggcagctcggcccatttgctgtcggggttttgatatatcagcttgatctggccggctctggtcacacatatcagtgcgcctttgttggctgggtggaatggcccgacggggcgtcgacggaaaggcgaatatgcccatcggccattcaccttggctgcttgatgaaatgcatgcacctatattaccagttagagtcctttcactcttatcttgatatatcgatggataatacaaggggactcaacgtacataacgctgggagttcagccacatcatcccaacaacctggctgccatcatcgccggagtcaaatgaggcttgacgcaagcctgtgatgctgttcagtgcaattgaaatggaatagattgatacccgaccggaacagtcgacaacggccagttctgagcctgtttcattccatgatagatgggccagttgagtgccattatgggcctccaagactggagccaaagatgactcttccccgagcacccatttgccatctgatgggcggcattggagatagcggataataacccggattccgtctggggaaatagatgcaatacatcccatccgagaccaggcgattttcctagcagatggttagtgctggaatttggatgtgcaacatttttccaagcttactggcagcaccctgatagacgcatttcatctaagcattgtgctagacctttgattggggaggcggtcggcaagcccagctccagggagttgggttctccaaagagatcatccacatcgataccgtcctccatgatcaagggcatgatattatcggaccacttgtcaaatgtgtttgatgatcagggaatcaatagagcagcatagcttcatagagttcctcgcaccaatgaatatcagagatgggctttattattatttggtcaaagggggagtggattcccgagatcggcacccaatgttcgagaagatatcccaaacaccaacaaagatgtcaccgtcaatgcagcaattcccgatgtcaatatgagggggaccatagaccaaatccagatgttcctatgccgtcagcgcctggacctccagggaccaacccagtgatctgcttagtcagacctcgtgacacggatcaggtgacgggtagccctgccaacgaccgctgaccaatcagggggaatataaggtgacccactatttagcagagcgaatcactgccggtcccttgaactgtcaaaacatggaaaacagaaaaagagtggcaggaaaaatagaaagaaaatagccaaaaataagagaataatcggagaagcacaatcggaagtatcaagcgccggattagggcgtgaaagcgcaattgactactataaaccccctacaaagtacgatcaacggggcttcaatggcatcggggcatcaaagactctctcgcgctggactacggagtaattccctctggatttccgaagtatacagcgtagcaaccttgaagtcttaaacccacagccgttcgcatcaaaataacgtcgagtcccgcccttcccggttcggttcgctcaaatcaatttgctcctcagctcaacattcctaaatccattcggccaaaacaaagactgtttttttatctgtggcccgctcttttttctattctgtttttctccggcccatagagccctgaagcgcacgagtttcattaatgttcccccccccctaacgctgacctcatcgtcaacttccttcagagctacaactttcgacctacaactattcctactcttttctaccctctcttctatctatctcgaggtcttacgcgtcattgattcttgattgatctttattccgcatacattcatgattcctcttttcgaggttttctacggtctgtgagcaatttggaggtaccactcggtccttttcgccccgattccccctgggggtgaacattctcctacgccgtgacacctttcaacccattcgcaactcccacgcagccatgggggatctcaatttggatttctcatccgattcggagttgagctccgtgccgtcatcaccaacattagcagcgcagtcatcacccgagccagcagagcggtacccaacgccttcatcccaagtgggagctgagtctgctgagggttctgcgcgccaagcccgtcccgcaaagaggagacgaaaccccctaccaaaggaacgaactactcaatatctcgatctatctgaacctctctatgaacaaaatgcccaacactatttgctagttcaaactctgcgtcatcaaaaagacattgtcgtcatcgctggcgctggaatttccacggccgcgggtagtaagtttctgctctaaggattctgccatgtttgagccgacactcataactctgatagttccggacttccgctccacagatgggctcttcaaatcattgcagaaaaagcacaatctaaaagcttccggcaagcttcttttcgatgctgccgtctaccaggatgacgcattgacggcgcccttccacgaaatggtccggtcgctgtcggcggaggttgctaatattaagcccaccgccttccaccaaatgcttgcccgattaggtatcgagtctcgcctgaagcgactttacacccaaaatatcgatgggattgaaacctctatgcagccactggcgactgaggtcccacttaacgtcaagggcagttggccagtcactattcaactgcacggcagtattgagaagatggtatgccagaagtgttgctacctcgacaacttcaaccccgacatgttcatgaaagccgacccgcccgcttgcacagaatgtattgagaccgacgaagcccgccaaatcggcggtcaccgaagccacggaattggccgcatgcgcccgcgcatcgtgctctacaatgagcacaatcctgacgaagaggcaatcacctccgtgatgaacgccgatatcaagtcccgtcctcgtgtcctaattgtcgccgggaccagcttgaagattcccggagtccgtcgactcgtcaagagcttgtgcacgatgatccgcagtcgcaaggatggtgtcacgatgttcatcaacaacgaaccaccaagcggcaaagaattcgataactgctttgacttgatcgtcaaggggtcatgtgatgaagttgcacatgaagttaacctcaagtcatgggagtcagaggacactaccccatacgtgtacgaatccacgcccgagcccattcttcgtccctcaaattccacgggcatttctgtcgtagtcacaccgaaaaagagacctcgtgcagacactggtctcgccacgccttcttccagccacgacgagaagcccacgaaaaagccagtcaccaaagcttcgaaaatcaagatccaaaacccagcaagcagtggccggtccatcaaagatattatcaagaaagaaaagcctgctgctcgcaagcctacctccaagttcatcaccaagcccgcccccaatcctcgacccaaaaaggccgcaacagccgccgcctcgaaaaagagtgccatacccgccgttccggtcaagaaaatcgcctcgttcggccgtgttaccaaaacctctcaatatgctggcaagctcgttgcaaaggccgacggcaaacctatgcaaccggtctcagcgggcgcctcgaggaacaacggtcctctgccaacaacagagcagcccgagaaggcagacatgctcgatacagagtctcttcctcggccagtggcttcctcttgactattctatgttctagatcctgtactgatcttctattctatgttggctgcaagttcatgacatgatgcatggttaccgaatggcgtccttggtgttatttcccttcattgtctttccggtgccttccccttatccccttctgggatttccgtttcttcacttatgtttacatacttctcttcgtggactgtattcctacttgcatcacctgcgtttgctttaggttgatgattgctgctgtcctcttttcgaaagataccaattgatagaccacggtttctcgcatgggttggctcgggcgtttttgggacgaagctggcttgttccagcgtgatggggtttccttgttctatttctttttccttattcttaccttcgctcatgccaatctgcatgggtgtttcatgttggattatctaaatgagatctctacttgagttccacctacacattttgtcaggtgctgtcttgtttaatactctttccttgttctactaggaaacaagatggtttcttttcctttgttttgtgtctgtaatctttagtgtagtagggcattgggggttgatataaacatcaactcctggctgcgcaactgtaatgtacgtgacatgtcgaggattgttatactatattctggacttcatcaaagtttaccatcttcgactgtatccaagtagatatcaacagagtgcagcataaaatccattcgtcattatgtgtatagtacagcagaaaacatccttttcatttgccagtcagtctctcccaatgccgtccagagtgagttgtctttggctcattcacatagacatggcctggatagttagcccaacccaagatcatcccgtaactgactaccaggcccatcctcatcttcatccgtctcctcggcatcaggatcataaggccccctcctcgcaccaggctcacggtccaaatcctccacatgctcaaggttatcctcacgcggcgtgcgatcttcctcctcttcctcctcctcagtctcatcctcttcttcctcttcctcttcaacatcttcctcttgagtctcatctccatcatctccagcagtcggaccaacagctttctccacactcacgccccgcttcacccttttcgcggggttatcaagcatatcgacatcagcatcggcctgggtcgcgccttcgcctaacgcatcctccgtggagccattctcatctgccttctttggcttgcgcttcccggcttttatttccatatatgcctccagttcctgttcgagcctgccgcggaaagagtcgagttccagctcggagagggcgttgaagacgtctgatggggcaatggtgcgtttgagggttgcatcgttggcgctaggaaagcgagggttagttcgacatatcataccatgggatagagtagagcaaatcgtgctttaccatccaacatatttgggactggaagcacgccaatggcagcggggtaagggtgaaacatactgtgaagacagataagaaacaaacaccgtagcagccttctgcatagccaatacagcgtccttctggatcgtcgtattcggcgggagaaccgacttggcgagacgaatcgtcagtgagcgtggtaggagatagtcctatggattaccggagatagcgttagcctggtctggttcctcccctgcccatgcgtatatgaagagcccatgggtatggtgacatcctttaatacgcaatgcatgttcatgttgtcttacctcgacacttgcgcccgcctcagcccgagccttcaactgctgctccgtcgcaaagacgggcttgtcggtgtgcgccactggagacgagtgctggagcagggaatcatcaggatcagcgggcgtcactgaggacgtggatttgcggggtggcatttttgtatgtttgaagcaggtaggtaggtgccttcgtggcggttggttcaagggatcggggggttgacgatctgggccccccttggatattgaatcgaatcaaggcctgattgtttctctgtgaaggtcttgagggttgtgtctaactttgggcggcagttaactataggctttgaagagataacgttcgagggttgcaaggaagacgcgccaacgcgttagatttctcgatgcgcgagtgtggggggcttggcggtgatgtctactctacttcgacattatttatatttctatattcacttctacaataatatttattacaatctacagttttggtggggtttatttgcaaggaattgattttactgatgtttttataccattgaaattgagatcaagcctagggaaggatggaatgccaacataaaacgcccactttttggtatccagaaagatagaatcaaatagataatgagttcataacacgagcaggaagagcggcccttactcgaccatctcatcgtcatcaccttttccattgccccagagaccctcgatgctgaactccttggcccactcggtgacaacctttgtggtgtcaacaccaggctcgatatcgccagcaggagcatctgccgaaaccacaggcagcacgggtgcagtggcccagccttgaatgcggccatctctccagtcgttgataacggtcatggcagcgctctcgatgttggggataccgtgctttccgagacggccgcgcttgcgtgccacttggaccaagaagtcggtggttttatcgccattgccagggaagagggcggtgatgccgtacaactcgagcatcttagcgagaaggttctccgatgaggataaacgcttcatcaagaggttgactgcgggaatgggatcctcgatctgcttgggcgggacagcgttgaggagaatcaaacgcgcctgatcctcttgcttcttgttcttcttgctagacttgtcggagctggggaagacgattccgggcgagtcaatcagcttgagtctgctgtccagcttgacctggcgcaggctagtggtgacaccagcctcggcgcctgtggggcatgcgttgcttgagcccttgttcagacgtgcggtgagtgcgttgatgacggacgacttgccgacattagggtatccaatgacaccgacggagatggctcgcttcaactgcttggcgccggcgtatgacttgagggcacggaagagtgtatccgaagtacccttgattgtcaactgcttgtggtcgaaggtgtgtgcgttggaagtggtgccgctggatgccttaagggggagagtggggaaggagcggcgcaggtgaagcaaccaagccttgagcaccggcggcggaaccagatcgatcttgttcaaaatgagaatcaatcgcttgttaccaccgtccgccatcatgatctcgcgctcaatatccttagagcgggtaccctccgggtcgcgggcatcgagcacgtatagcacgacatcggcgttgtcagtgacctgcttgaataccttgtcgaattggcgtcttgagctctcctttgagtaagactttgagttgaccaatggcggggcagattcgtcaatagttgcgccctcctcgaggtcttcatccatctcatcctcgtcctcgtcttcatcttcctccatgtcttcgtcgtcgctttggttgtcctcgtattctacggcacgggcgcgtgctgaggcgagaagagcagccatagggttcgaatcattgccctcggcatccatatcatcatccataatatcgttctcatcgatgtcgacagccgcggtgccagtcgcgggcaggtcttcagtcttgcgggtttgtgctgcctctcgaatacgtttttgctcctcggccttcatgcgctttcgctcttcaatgtcatggagaagcttgtccttgccggggaagagattaggaatgccggggtccttcttaagttttgaccgccattcagggttctgcaaagaacatagtcagaaacttcgatcagaaccatcacgcggatattgtctgtagtaccttctttgcgagcttcttttgctttctcgccttctgaacagcagacttttcaatcttatgcctcaggcggacgggaacccgcttggaagtcttgcctgtagaccgttagaattgcgcctcagaaccgcatgagcgagaggtgaaagagtatcataccaaagccgctcttagtaaccattttcaatgcacgtatttgttgatcgcaaagaaaagtgcacagcaaaccctcaaagtctgtccgtaacgggagtagaaaaagttgagtgccaagatttcccagccgataagcggattattagttgggccgatctccgataattttcaaatgacgatgactaagcatgcgggacagttgctaaattaggtacatacccgactcagtggaggcatcggggataagcaagaaatatattatttgatgacaccttatcctccattatcctcccttggaattctggttcctcttactgttgatatttaacacaaaattatcaacaggctgcttcttgtttttcacaaaatcggcttctctttctactcactattgactccgcgcgcattcaagtctccccgcatcccccaccatgtcctcagcaacaggaacgttctctgcgcctgcgcaagtccacacattcgatggtcttctttctgacttcgatggcacaattgtggactcgactgatggtattcgatccctattcaagtcctcctaagatcaattggaaccaatactgattatccggtactgaatagccattgtgaagcactggcacaagtgagtcataaacacccaacatgaccgccgcgcaaactatctaacatgaattccgcttcagatttggcaacgatctcggcgtcgaccccaagattatcctcgcgacctcgcatggccgccgcagcatcgacgtaatgggtatatacgacccaaccaaggccaactgggactgtacgtatattggattctaaacccccaaaccgatcgctatcttccgatataagcaaaggatataaactgacaatatttcctcgccacagatatcaatgaagtcgaaggccgcatcccgaaggaatatggctccgacgccgtcgagatccctggtggccgcgacctcctagcagccctcgagacctccggcgcaagatggggtgttgtaacatctggcacgcgccctctagtccacggctggctggaagtgctcggcctcccgcaccccaagaacctggtgacagcaatggatgtgccgctcggcaagccggacccacgctgctacctgctaggtcgggagcagcttgagatcgaacattcaacatctattgtcgtacttgaggatgcaccgtctggtatcctggctggtaaggctgcagggttcaaagtgattgcgttgaagacgacgcattcgctggagcagctccaggaggctggcgcagattggattgtggaggatttgaggagcatttcggtcaagggggttgttgatggccaggtgcagatcgagatcaagaatgcgtatcaataggtggttgttgccatctcagttgcgccgattcgctgctgcatgggcagggatgtgctctttcatccacagctgcgtgacgagtttctttggggttggatgcacagcctaggcgtctcatggtaaagatgtcatgactttttatagaattaacgtgcactacatacacgttggattgttagatatatattcaaattttctagactttttttatcaaaccaagatttgtcttattagcgcagcagtcagttttgtcttgctagaggacttatacactagcaaatgaccacaatttgttcgtattcttctgaaaaacgaggatcacagttggtggtgttgaaaaacgatacctatactagagaggcaacccggattccagctgctgtctcagaccatgtaactggccaattgggcttttgagtaggaccgaatgctccccgaccacaagaactaggctctacatatcccgaaacggtacaaagataagaggtcccgaagtagctcaggtggttccccggccggggatgtaatcgggccaggcaaggtgcaaatgcaagatagaatgtactatgcacgagttccacatacaacccaccatgtgtaggtagttagaagcaggtatggagctcactctagcctcgcacacgaatcagcggtgctatcgccgttgcaataagtacggacgcatttaatgacagcagacatgtctcataacaaggatggcggctagtctagatgattcgaccggcaaggatcaaaccgtatagctgttgacatggtaactggacgccctagactaccatggcgtggcggacacctttcgtggttatgcagctacgcaatccttgcagctcgaagccggatttcttcagcagggcgttgcagcatgcaaatgtacctgctactcccgtctgatccaatcaatcaggcagggcgagccgcaaactaccgttcatgtacgcttgagccctcgatggatgtggaaccaggccatgagcgcggaagtgcatccccgaggggaatgacttcaggattgggaaaacaataccagatctgcttttattggagctgggcgttctggctgcagccatagagggttcagcagctgcacctagctctttcggggaaaggattagatgctcacgaggatatgactgcttttcctcccggcaactttggaacaaaatcattgtgtgaatgccattggtgggccaattggttctggggtggacacatcctacctgactgggggagcttggagcgagagccaactctctccaatggtgtcgaggaagcccactcggccggtgagaacagcatgcaaggggcctaggtcattccgctcatgggtcgggaagaggtgatgttcgaatgcagacctggatatcatcacaattaaccgaaccaagaaaggcgatatgggagagcagtctcgctctaaatttgagggattccttgtccatgaccctattacattgaactctgtatgaggatgtgtgatgacgcatgaggggcatgcaatctcatcacatacagcagatttgtcctaattcagatctggactatagccttgggatgcaccgggttggggggcgtgtccaatcatggtgcagaccgttcctcttgtggctagtttttgtagattattctgcttattctgcgagctcgagcactggtcccccgaaactgacaaatacataatgccaaggttatagttatgcagggcgctcgatatagttgcgcaccgccacaggcatttggtcagcgccacaagggattctcgaggacggatctatcacattgacagatctgcacggctgagccacctggcttctggcaaccgaaatactccgagcccctaaaatatcgtggttgacgagtcgagaaaagcactaagccatgcgccgccatggataggggtttgatatcataatcggagggtggaggacggtccgacctcggccccaattgaccgtcaatctatgaaggtttgagaccgaggaatatttcattttgctatcccactgtcgatcacatcaatttttcccggagaattgtgtcccattgtcttcaattttgcacactcgggcagtgtgtggttgttgttgcaagcccgatatttgagattgtgatttcggtgatgggaggggatccgtgcgggaacttggaaatacgttacggatcgatccaggggtcccgaggtcgtcatggtagatcccccgaacttttactacgaagtcgatctctgtgcaacattgctgaaatagcctaaatatgtactcaagtacgagaatggggcttgttatacggagtacttggaactccgtactccatatgttactgcattaaaggcgtagagaacatcagagatcggggcctctcggccaggctagagtaatatcaaactggtccatctctacgctgctcggattcgtctatgatgtagtgtactccccatgaactcggaccatgagaccatttcgtgagtgggttggtggggcatgatgtgccaaggcgaaagtgagcacaatcgcccaaaggaaggggtcgtgaagctgtcgggagtatcatcgggtgtgatgtgcgccgatacgcgccttcatgcacagaagcgtggacgggaacccgatttataagtttctacatcgtcacaagcacgtccatcgcagaattactgctgaagagccatagccaggtatcgatacaaagtttgaggggatcgaaaagccacgttgtgtacggatactctcgtatgatctacccactccgtggagctgctagtaccgtctcaaacaaggtctttgctctggatttttctccggagcgatacctcggtgtcaatcactccaccatagtcttctaatctatgactggctgaccgagcatgatcaacctaggatcactatagcgttggggtattttgggtcagatcatgctaccagatagagcagtcaaaaggtagatcactaaatcgaggaggggtgctcttgtggcttacagctagagcagaggttccgctaggccggttcattgttgccttattctctggtgctactatccatgtgtcgacgaggtcatagttcgggttcgctatacggtaggaggacaggcgttcggggatctctcgactccatagtttgagattcgtcgcccagggatctcgagtgtttgactgtcaattgttctgaacagctgaggtgaaagattctgagatgccccatggtagagtactatctacaatgtcctccgtataatggaactgcctacttaccaaaccaaacgtagaatgaaacaaagttgagacgaaaggttaccatagcgtcaaggacagcccagcagttaccggatgttcgggcagtgatcatctttaggcgcatgtgcatgttaagggggtggacaaagttggggctgcaatcctcgtgacttgcgtgcatagaacgtcttattccagacgtttagcgcttgtacaacatagagcagctccaaccagaatcccgggaaaaggcaagatggtgtcacatacgtcgaatatggttggagcctggaaaaagccgaataacagggggcacaagatatgtgctcagagagggggcgccacatccaaagaaagagataaagaaaaaaagctcggcagatccttgagtgatcgacgggggatctgtcgactattgatgtttagtttgtcttggctgactgccatgctcccgcactaggatggattggtgctagtggaaagggggagactgtcagttacagatagctgacacctggttgcttcaggagtcactagtctacggagtcactattatacaatgtgcctttgtagatagagtagacatcatcatcatcgctctccatgatcgtgacgatcctcgaatcaaacaaccgtattgtatcggggacctgcccgatcgtctgacccagagcaccggtctccattcaccccggtacgagggaacgcctaggactcgaccgggatgtttagggaggaaatgtgactgttacctaaagcagattgattagttatgcaagtccgatcacccacgggtacggaattccgtaccgatgtctagttacaacttgacgacgtcttacgtgtaactactccgtagggctatgaacatacagcattgtactcctacggcattatcgcacgtaattcggtacttactagcagatccactggtgtttctttccaaattaaattcttctatagtggacatgattttctttgcagcgacgggcacctcctgggatcggacatgacgctaatgcaggaactgggattttttgcgtttgtgtttttttggtttgtggaattcgcgggacacgaaatggtggtcctcaagccgtgaagagatcttacaggaggtgtatcccgtcgtatatcggtattttaaatcctataaaataccgcgggaggcatccgacccaaactcggctctccgcatctgaaccctggctcacctttgtttaatccgaagcttactagtataaggtacactaggtacatagttataggtaattccggtgctgtggcaggtatggaatagaaacaacgattcatacgagatcggactctatggcgcctcgtatgctatgctatttttcagtcacacgtccatgttgaaataggttcacgaggggggagtctggacgggatcggaattatgttatgggccaactctattctggaaacagaccaaaataaaaaaaataaaaggataaaggatacatcgtagagaataagaataaaatccaggatattaaaaaatcaaatccaaatgtgactctgatgcagtcaggccgccaccccctaccgagcgggcggtagcgcgactccacgggctaaaaaaggatgaaatacggtgggggtggtaattcggctttcaattcgtggatggttggagaagcagacgatccccgatctgaattgcttttcattgcgattccttttccaggatttattcgaatttgtatttaaaatcttatttcgatataattgagaatataatttcgatttgctatactcgatccaagtataggtacccgccccccgggtactgatagcacacaagtctcatgtacccagtacaggcacagacctttgcaaggctgtttcatctgattccccgttactgaacaatacccacccaccacccaatcataccacactgttcggcagctctgtacggcgctttaccagccgtcacccccgatcttcccagcgcctcatctttctttctcttcatccttttccttcccagtctttcctttacgtgactttttttgctttttttgctttctttttccatacacactcttttgggtccctaattcccgagtctctccttaatatcgactattatcacaagctaccgctgctcatttctttttcttgacggactacccgtactgccactctttacatttacaatcaaggtccctgccgttcccatcagaggttgaaccaacccgaatctacttcatgatatagacctcgttcctcgaacctgccactctcttgtgcagccccattcccgtctctatctctcttgcgcccccacggcttcttctcccctatacttgcccactctttgctcccgatcatcatgagctatattcacccctcatggaactaccagggtcaccagggtatcccaatggaccaacacatggcatacgacccgtccatggtccctccgccgatgatgcaccctatggatggctatatgtatcaccacccgccaatggagatgatcgactactaccaccaaccgattatggactacgacgaatataccgaaaatctgtcacgaccgcggttgaccaaggaacaagttgaaaccctagaggctcaattccaggctcatccgaaaccaagcagcaacgttaagcgtcaattggcggctcagacaaacttgagtctgcctcgcgttgcagtatgtgaaatagaggctataaccttccgatctacagagagctaatcgaatgaatagaactggtttcagaatcgtcgcgcaaaggccaagcaacagaaacgccaggaggaatttgaaaagatgacgaaggccaaggccgaggccgaggaggctgctcgccggaaatcagagaccttggaccaactgtcgggatcccgaaaaggatcaattgcgaaggaggagtcggagagatccgctactcctaagcaaacacctacctccacgtccagcggtcatgccaagacagattctacatccagccgttccaagcaccacaaaacaaagagcgagtcggcaagagaagcaactttcgcatctctgcagagggcgctgaatgctgcctgtgctgcccgggatcgattcggtcgccggattaacccccggagcaagaatgagtccgttcccgaagaagaagacgaagaagagacagtgtcccctggctcaatgccaccaccgaagacgaccactccagctagtgatcatgggaaccttgccaacataaacacttccttttcaggttggtctggtatcaaggaagaaccttcctggggatctggcgggcacaatgagaatatgggatacaacacagagcagacctcatattccgcttgccaccaatcaatggcagagatgtcaaatcacccccactctatgcatcagaacttggacgtctactcgaaccacctaacccctcacagggacgagtggtctcaggacagcaacccacgacacgaacaacttgtctacagcaacatgcaatatccaatgtccatgcaggcaccagatatctccgtcacacgtcgtgagtcttctgatgcgctgactgcctcactggagggcattggaatctgtaccggccaatctgggatgtctcaatccgtcgatcgagcagacgggatttggaaggaacccggcaaggagcttgatctcgccgcacgccgcaagcgccctcgtcccgctgccattggcacttcgggaactcgtcccttggccaactcgacctcgatgtcctcgctctcgcctaccgctcgtatgcctaatcacagtgctggcaactcgatgagacaatccaagtcaactcagagcctcaactcccggtatgcaggcgtgaggaaggcatcggctgcccagcgctctccactcaacttcacttttgcggattctggttctatcaagaaggccgagcagatgctgcgaccctcgctctcgaccactagcctagctccacccactcccttgactccgcaagacctccagaatttcatgcctgcctcccccgcggatagcaactactgcatgtcggcccactccacagcccacttcttccctacttctcaacccatgcaggtcaacatggcatcacctcctgctacgccaatggatatttactctcccttcccttatcaaaacgttgctccccctatgtcagctccggctcacgtctcttccttccccgagtatatcacatgtgactcgattcccatcccaccccgcagctgggccgacactgcttccatatcttcgcccgagtacccggctggtctccaggtgcattcaaccactgtctcgcccatgggctataacgcgaccaccgaccataccgggcaggcctttggaatggaatcggtctctggatctccgtctttgatctattcgattgaagataccgatatgccaggctctgcagagctcgcggagaggaagcggactgaattcatgatgcacgaattcccagagcacgatctccagtatggtggccatcacttgccatcgatgcagaagccgaaagcctacacgttcgcaaacaacacgacaccaagtaactacccttcctaagtgaaggttcattgatctttcccttaccatggatgtatgagcaatgcgcgacaacttttggtgtttttggtctactacaaaaatttctgccttcaccttcgttttcctacactttccctcggggagatgttgtatacccaaccctccgtgcgcgaagaagcactgtcactttatgtctcctatatactattttccttttcgtgtctctttatttggggtgtattcaccgggtttttacatatttggagcattccttgcatgttgtttattggcctaggagtgtttttgttattttggtgtctgataggaccttttaatttctgccgagcttcctcccgggaacttcgagacctcttttaccttctacctttgtctactcttttttattcctgttggaatcggttttgtggattggatttgaacttgggtttgcatatggctttggcagcatctggctttgatattttccacgatatatacacttgttatgtatctacactatctcatatttctcaatcaaatcaaaaaggggttgatctcttgcattttggcatttacccgaaataaacccgatcaaccagcagacggtcagggcttggctattaggccaagccatcggtgtcttgccctttttatattgtagctcgctcatccgagtactttgggatatactccgaaggtacactgatgtcgtacaataatggatccagcacgtgcgccagaccataggttgtggtgtccggaaccttggaacgcggaaaagcgcccctggaactcaccgtaaccttaactaccacgtgcgctacagtctctcaaggttcgtacctgtgtataaaaggagcatatttgtcgatcttatcccaagagccagaataaatttgtgtacatatttggacgttggaattgaaacccgtgtatctccgtccgatgagactatccaccctcggcacagcccttgtgggcctagctgccgcgcaggcatcaattatcaattactccgcggtcacaggctacttcctgcaagatgaggcttcgactgatgcctctacatttgactatgtaagtgaacaaataccggcgaattatagcagaaacaatctcttcgtcgacgccttattattcggtccgctgacatgttcagacagcggagaacttcggcctgatcgcccgctcatatcccgcagacaagaatcacaagaagcacgaatctctgacccaatgggaacgcttctaccgccaggtcactgcgttgaatgatcattcccccaaggacgtcgagtacaaggttctgttccttggtcgacatggcgaaggatggcacaatgccgccgagacctactacggaacgccagcgtggaacgtaagtccctacctatgaaccaccttaacgttacaccaggcccaatctcaccacctccattcagtgctactggtccgagctcagcggcaacagcacagcaagctgggcagacgccacactcacacccgacggcatctcgcaagcgctcaaagcaaacgagttctggcaaaaggagatcgatgaacaacgaatccacaccccagaccaatactacgtcagcccgctgacacgcaccctgcaaaccgccaatctaaccttcacgggcctggacctccccagacacagcgcgcccttcaagcctaccatcaaggagctcttgcgcgaagggatcagcatccacacctgcgaccaccgccgcagtcgcagctacatccacaagctattcccgcactggtccattgagcacgggttcagcgaggaggacgagctgtggaacggcgtgacggccgagtcgagcggcgcgcaggatatcaggagcgcccaggtcctaggtgaagtgttctccgcttcgcccaagtcgaagacgtttgtgtcgatcacgtcgcattcgggtgaaatcgcctcgattctgagggttattgggcaccggactttcaagctgaataccggtgctgttattcctgtgttggtcaaggctgagaaggttcgcggtaaggcgtcgactacctctgtgccttgggaggtgagtccgcattgtacggagccgccggttacgtcggttacggcttgtgtttgtccttccagtgcggtgcctgttacgacggctttggctactggattttagagtggctttcttggctgggttgggtgtgtctaatggttttgcttgtacagacccgatgtaccagcgaagcaatttgtgatggtatttgttacaaataacgggctgcttaggactccttccaatgttgacggcgtggttcgataatctggtccataggcttaagatggtacaaaggatacccaaacccgtatgtaatattcaagattcctttctctatagtatctttcggacaatctactttgagggccttaaataatatctttttgatctctttctattctcttgttgatattttagatgtcgccccctctcctctattcgtactgccgcttgtgcggtgaaaaaaaaggtgtaatatcacacacaacatgataggttagatgctaagcaaaaaaagacttttaacaaaaagaaacgtccccgggaaggcttgaacttccaacctcccgattaacagtcggacgcgctaaccaattgcgccacggagacttgattgtggcagaggtcaataggaatggcattatgagcatgttttaatgcaatcgattttatagagtgtgaacagatcatagctggtacttaattaccccccttactattgacctatgagtaacgtgtgagtaacgtataagtaacggctaagtaatgtttaagtaatttctaagtaacgtacaagtaactaacgtgcaagtaatgcgtaagtaacggctaagtaacgcgtaagtaaagtctagttgagcaaccaacgtctaagtaactaacctataagtaacgcgtaagtaacgtctagttaggcaacttctaagtaacgcctaagtaacgtctaagtaatgtataatagaggcttggaattttatgaggctccggaagcttcaaaggttctttctccacataactatgcgccttaccgtgattagtcatcttttagagtttttgacatacggtatagccctaggtcgctcgaaagtcgctatatatcatgctagtactatacctcccatactctttcgacgttgatatacttcaccactatatctcctcatcaccgcgcgtttatgatgtcgtttcccacaattgaaaggatggcagccatcacaaggctggtacatcagcacctttcttccctttcttccctttcaatctaccataacaagcttgtatccatcaaacaatccttgttttgtctctgtgaagcatctattgtgcacttgttgtgaattctgacacttgttatattgttcctatcttttcgggttcaattacagcaatggatccatctcaggctcaaagcctgcccgtgtcgcagctgtctgccgtgaccttgaccacgtcgccctcggattcactggctgtggtggccttaaacgggtcgcccactcagcagcctctaagtgatgctcctactgacatctacccttcgccgactcctcgtgatgacgcacagtctaatctgggacgagagtcatcgctcccacctgaaattttggaaatggtaagtaacccattgagccaagccaatgcagcctaggtctcttcggccagctaaccttgtctcagatcttttatgccgtacttgaaagtcctcccgcgtttgaggaatacgacttcatttatggggatgtcttcgacagcccggcgaccaaggaggctctttcgactttcagactggtgaaccgggcctggaacttcgttgcaactcctctccttttccgaaagatccaggccatgatcggatgctctactattcgaccccttgataaaatcctaatgatttctcaaagtccatacgctctttacgtacgcgacgtgcactttggtctcttgggaatatggctgcccggactgggttatgatcagtacatcgaggatctggcagaaggaattcttccgctcctgatgagtcgtttcaagaacgtccaaacattccggttgcaagcaccccccttggtagactcattcagcccattagcactgctcatgccggatatgcttgccaagctgacaaattcttttgtgcatactttgcgctttatacctgtcccgagactgagatgccttcatttgtctctgccaactacggcggaatttgctcgtttcttaacgacgtactcatactccaagagcttcgccgaaatttgtgccggaatcgaagagctacacatcatcatcaatgacagcaccggccttggtgtcagggcaaccccgagacgacctcgctcattaatcgaggccgggtttctaatcgggcaatttaccccgtatctcgtcctactcatctctcatgcaaaacggatccaagtcctcagcttgaatgcttatagctggcttgatctatccgatctgcaagcagggagtttctctcaacttagaagcctccggctcgaaggtgtgcaggtcaagcccgagactctccatcagattttcatagaagctcggaatacgctgcttcgcgttgaattgatcgatgttaagctcctggccggtacctggtctgaagtttttgatgttttccaatcttctcgattgcttcctccccctaacctcaactggcttcatatttctggatgtggctacgccatgaccggccaatacactactcgtggattctcggaagtccgacaagcactctggtccacccgtggccaggactggattggtcttatagcctggatggcgatgacgaataacaaccgtagtttccagggattgcctccatgtccgcattcttacttcccgactcccccagtcatcaccatcgactattagtcggatgcattgggagtcggatttacagaacaaagaggtcacaggggggggcatcatgatttgtaactgctgttctggtttctggtgtctgggcttactgccggtagacctcgcttggggttttcccttgctggggtgtctacccggtgagtaactgctgtccattcttctctgcctggttgtttcaatctccaggagaggtatgtaagattatttgtcgattctgcgtctggtcgtcttgacctccaggcgtagcaaatgtaatttacgatttctttttccttcctttttctggagtgattcttttcctttcctagtctgatttctgggtatgcggtatcgtagtatattgtaaaattgcgagaagctagtcaacctctgagttagttagtaaattagttagtcttgcacccatgcttgaataattagttggtgacttgtgctttgcggagtagcatgcctctacaccctttcacttgtgggcgcatctccccagtttcaatgtctgaagaaatttaggttttcatggtttcacgtcgtttcgtcttttcttcgtttttgcccttctcccttgtggctacgagaataatattgaaactcccaaccctgatcccttagctttggttcatatagcataaaagtcggtcgctcttcatcaaataagtctccgtggcgcaattggttagcgcgtccgactgttaatcgggaggttggaagttcaagccttcccggggacgtttgttttttgattttgaatcaaatccagttatctcatttgcaaggggacattcttgcttctgtcttgttttttagggttaattttttgggggttctagtcagatagggtgaggttggtttaaactcagtcgtcgaactttatttattgtactgctcaattgtatccatgggtgtatcgtacatacatagcccttctttatctagtgcatcatttatttggccgacaataaaacgagctatatgcagtccctagtatctcggtcatcttcgagaagtaggaggaactactacttgatgttagcgaggtctattcatatcaaagacaggaactaattgtgactactacgtggtccatggccatattctgacgacaggttatctcgcttcatgggctgaatagaccagttatgtatcactctactctttattgggacagttatagctccagacatttggaggcatcggtgtttgggggtggagatgcttagttgatgttaaagtgttgtacgaaaacagctatctagccggttggtctatggtatttacattacagtttttcataaaatacttgacatgtatatgtagatcttattcccttcagataacaatggatatctataatgccaactcgtgggttgttctggtttggacgggattgtatggtttgcgtcgtcgtgatgataagcaacccagcgcagatgtgatccttgggttgattatgtgtgagtaaatgtccgggttgtaggattgggtggcactggatttgaagttcgcaggcctgggtcaatcttgtgactccgggaagtgtgtatgtctgatggatgtctagttgattgtagagttcgagactctcgatggctgtttcctgtcgcgttgcggggatatgtcatctccatctatggtgtttgctatgtttattctgtgtttatctatgtagcaactggtggccagagcgaacaagttcgaggcatggtcggacgaagtagcgctgtgacatatatatatcatcgccgaaataacaacatctcaaattaaaatataccctttgttttggtgtttcagctggggaatgaagagatatatatttgatgagatcttcgaattacttgatccctgttggacaaaggaatttggattaatatgtgcatgataatatactacgatattaggactgcttgctgtgtacgacaagcatgagctttttataattccactgtctcatgtctatttcatgaaacaagtctccgtggcgcaattggttagcgcgtccgactgttaatcgggaggttggaagttcaagccttcccggggacgtttctttttgttaaaagtctttttttgcttagcatctaacctatcatgttgtgtgtgatattacaccttttttttcaccgcacaagcggcagtacgaatagaggagagggggcgacatctaaaatatcaacaagagaatagaaagagatcaaaaagatattatttaaggccctcaaagtagattgtccgaaagatactatagagaaaggaatcttgaatattacatacgggtttgggtatcctttgtaccatcttaagcctatggaccagattatcgaaccacgccgtcaacattggaaggagtcctaagcagcccgttatttgtaacaaataccatcacaaattgcttcgctggtacatcgggtctgtacaagcaaaaccattagatgtatttttttttatgcttccatccatctcttttcgcgctattataagacaatagacagagaaaaataatttatatttttacatgttgtattagttcaaccaaatagaacagaggataaaaactaggatagcggctgcagcgaataatcattgatatgtatggccatccacctcgcaactacaagaacagtcgcgaccaatatggaaccagtcaaagctagatatcaatggagaaaaaaaaagtagggttgaaataccatatcaactggaatcaccagaagaaataaagtatggagagtagaagaaaccaagtagagaagagaaactgtcatctgacaggtacatgtatgtaatcgcaaaataagaacgaggccataaacattgatacatatgtaggcgagaacatctgggtttaaacaaggatagaactcaaatacacagggaaagcagatgccagcgaacaaggatcacacttctctgaacagctaagcgaccatcagacatctcgccaaggcaaaagaaaactagaccgtccacagtgattcaccctctattcatgtataagtaatagaacgaaaacacacatactcataatcctgtaacactctgtccaaaagggtagaataaacgccgagcataaggacccaacgccagtaaaggcataccaagaaaacaagaataagtaaacaaaggaacaggaacctcgaccaagaacaactcaacaaagggtataggaaggttggcccagattaacattaaccgaacatccttcaccatggaatgcagtgaagaatgcagtggaacattggaataggagaaaatttcaggtatgaatgaaaccatgtgataaaagtagaaaaaaaaaaaatcgagcctcagatgatagtgtaagctggtaagaagtaaaacgcccatctagataacgccagctgtcgcgagctagtacgaccacccaccccctaagggactgccagactggcccggttgaggttgtcctggttgcatcgggccaccaggtccgctaggccacccaggtataccattgcctgccatgttcattgcaagatttgcctgttgagggtttccgcccatgaagggttggccaccatgagcctggttgggtggatacatggctcgtgccatgcccggataaccggtcgggttgactcccggatatcctcccatgccctgcataccctgagcctgcgccacctgcgggtgttgtatttggggatattgctgaggcatctgaggtattgattgtcgctgttgattgcgaggagactggtggtgatgttgctgctgcggatgatgcccgaggggagatgggctttgttgcggagcagacatttgttgaccatactgagacattccaacgccctggtgacctgaagacggcaacggggagggctgtggctgtggaggtggctgcccccaaatctgctgttgttgcggtgaatatccgtatggaggaggctgacccataccgccacccatagatggattgggccgctgttgcatgagattgggctgcatgtttggtgggattctcaggggagactgtccaacggactgtgggtgagcctgctgggggtagtttggttgtccacccatcattggattagactgcatgggaacctgctgagggagcatatgctgcgtatgagcgggattcggcatcccggcagagggaatctgtgatacctgaacgggctgtgacacagacaaacccgattcgagagcggtattagactgggcctccgagaccggggcctcgcggggcttggagtaaaattcatccaagcctttttggcggaaactgcgctgaatgctcaacattttgttgaaatcagacgtgtgttgggcttgattcatgaggtctgctgccgagcttgtttgcgtgcggtcgtggtagggttgcccggtcatttcctggcgtgcacgaggcatgactgtgtaatctcgcagccgggggtcatccgtcgtcgacatatggatcatagggagtggaatcgaagattcagaagtatccagcgagagcccgtgcggcaatggctcgatggcattactgtagacaacatcgttatgaggcagcgccggcaacaggtttgtagctggctctgagacggaaccatcgcgagccttagccgcaccaggacgtttctcacccgcgaggtcatcctccgtgaagccctgctttctagctttggtctcccagtagtcatctcgaacccgacggccattcacaatcacccggctcccaaactgtcggaacatggatctggcagagacaatagcgatttggcgggaccgataggaatatggcaagatatcttgctggataagatcgtctttctcgatttgggaagcaatgattttatgcaacgatcggttcttgttgaacaaaagatacgaatcacgataattcaataccctcgcgcactcagtcgcaagcatgaatagtttgttgccccggaggggaacacggaatgtccggcatttatactcgcggccaccctgcggatatcccataggatctgccttggtctctccagcttcatcaaactctttagggatgtactcatcaccttcttcattgagctggtctgaagtgtgatctctcacagtagggagcgctttgactagggatttcgttggtgtactcttgctgtccggtgatgccagagacggcgacccggcggtggcttgcgacagtgggcgtgcttgcatttggggagtttgaataagcgtgtttgcgatgtgttgttcactagagcttggccgaggcgtctttgggggacgcccgcgcttgcggcgactttgttcctctaaaaaaagagacaatgttagcgtatattgaggtacgcaagctgtgattaggcaaagtgcaagcgctggtgggaatatagcacagttctggatggaacctattgacaatgccttcccgctgccaacgtaccatcgtcctgatccctttcgacatgtccatttcccatgtggtctggagtgcgactacgcttgacaccacgggggcttgctattgcatgggaatgtgctggtagggcaacagagactaggagtatcagtttgaaagcagtgacggggaaggaatacacaaagagacgagtcaatgagtaggaaaatatgattcattccagcaagtagtcccatcgatagaaaacagaacgcgcgcaagaatttgtgattgaggacgaaataggaaatgaacggcacgaggccaagacaagaaatgcgataagacacataccggggttgcttaagttcgcgggatcgatggtccccgaggggccatcaatgacatctaaaccattcattgtagataaggagtgagaagtgccatacatagcgggtcaaaggtcggacggttagagcgcccgtcgcaagatggcgcgtcaagtgaacgcgtaaggtattcgggcagataaggaatggaaagtggcgcaagagagcagaagatgctcatgcaagactttcggacctctaaggtagatcgaattaggtcaagtcgtcaaggagctgccttctaggtaggatctcggatgaacttgggtttgagaggggaaggggatcgaggcggtgaagatgggagcctgagtgttcaggtgttctgcaaccaagaggacatcaacttgttaataatgggatataatcttgcgcaaatcaagattttgatctctttctattatgtctctaccggggagaacttaagtcttgcaggggcaataggaaatagggaaaaaaaagaaaaaaaatagaagaaaacgatcgtctggtgattggtcacgagcaggaacaattaggactcacaagtctgctgctaagaaagtggcaccgaatcagacaaaagctgggctaattcctgcaggttgaatctgttttgggcttggtagaggctaggccaagtcgtttgtcctagagagctccgaaacaagtaaaagatacccacgataatgttggagattagtaattttctccccgggtgatagattgatcggatattgaccggatattggctacgataaaatgatcagatctgaacgaggccggagggaatggtgacctttttgtgatcttctgggcgtcgcgggtacggcgccaatatacgaatagggtcgataagagactaatgagatcatagacggtagcactcagctacagcagaagcatagaaaaatgtagttttccttctccctgactcctttgcctcctacataatccaggacgattttccgaggtagcacagcgatcgaatcctcgatatgggagttgagaaacacggagaaggaccctgcgtcttttgggcaatagcatccagacgtatgcaggaagggcaaaaacagagaaatgaataacgaattaaaaaaatcaaaataaaagaaggtgcaacagtagcacaggagtacaacgcgctttgggtttggattcctaactaggtacagaatacagaagatgtccgcattggagccaatcacgaggtcaatcacatctgaagtattggtattgtccttgtattcataaccacagttttaatatattgttgccgatcgttagatgccaaatatttcgagtatagaccatgggagagggtataaaattacaaataactttgtttgggtgtacctgaatggcctttttcctattccgatttcgagcaaggtctatcacaacatggacagagtctagacactatgatagacctcagatagagccatgatcacatctattcagtctggatcgtgtattgtgtaacttgacgtgtcttaaacagctactgggggtcaaatttatagacgaaagaagcaagacgtgaaaacgaagagtgatgaatatcggacgaagctcacagacaattggctccacagaaaagagacgaaattattgatgattcttgcgtatatgcgtgtttctcagccatgtccactagtgtagtaaacaggatctcaaggtccaatccgaagcaaagcaaccaatatgcgcggtcggattatatcgggtcaagcacgaactagaaatacaaaataagccacctgatactcaaatcgtcctggtcgtctagactcaaaatgtagttcttgttttatgccgacacttaacaagccgggcgataaccggagaaggccatagtgaggggccattagataaaagtaggaagaaggcgagaggaatgtgctcaggccgcatcttgtcagcctaacaggagctaactatcgactagttagacctagtgctttacggatgatgggcggggtatgctcgtgcgagagacttgatttagctcaggattgcttgattcaaatttacccaaaggatacgtgctcatggttctggggatgggagatgctcgcattatagtaatgggctagaaagcctatgatatatggtttataacggggagcgaacggtcgtgattacaatataaataaaagcctcgtgttgggtgtcggtgttttcacagcccagttgaggcatttaattcgccagaggatgggcggatgacctgcagaaggcgctgtagatggaacgggcagggtcatttgagcgggaactccctgattagtcgatcaacgaacggcccatgcgcgacttagaaagagaagctagctcgaaatggctctaatcagcacaatctccaaatcatccatcgtgcacaccctttatgtcattagtatcgcccaaatcggagtaggcttgagcccatatactcggaggcggctgtacgaggtagagcaagatgtagtatcgtcacacaacaacgcccgtcgagacagtcggactgcactatgaagtatattgcgaacgtacaaggttcgaaatggaaaaagcccagatatatgaacgctgtcccaagtctcacagcagcccggtcttgcagagctgccgttctccacgctcggcgccggcttttcttgcccgtcacacaatgactggatctgtgctaggcctaagaacacaaggtgaccttgcagctctaattaggaaagactgaatctctccatcatggacgctcgatttagaccttgagccacctgggtcctttagctaacggacgtagtcgatccatggcccggatgcaacatactttgctaactaacaccttgaacaatggattaacattaacttcgtgaaccatcgactcccgccgagtggcgggtctgttctttgttacgcatatttattgggttatgtacttgctcttaacgccattgacagatacgtacgtcaggtaaagaccctatcaatctcatcgtcaaaaaacatttgaagataaccaacgacgatcgcgataccgccacttcctggtgaaacccaatatatatcgttggcaaacccccacttctatccctacattcctagagacatgcagtggacgcatgcggagcagttgattgatacagatatgcggaggagaacatcattcattgggacaagaaggcattaagaatggcagagtagacatatccaatcgcatctccagcctattgcacttcgactcaatctctgagcgagagcgagttcagaatgttcctcccttgatgcaacatcagaaccgaattgtctccactaagacaacaaaggacaagaatagctctggccaagagttagattctggtagcttactaccgtcgatgagttagaggcgtacgcatatcatgtccctatcctatcgttattctgagtatggtaattccaggaactaccatccatgatctgcgtagaaaagacaggcatatgccgtatcaaaagcacgtgtaagttgtatatacccacgcgtcacaagcaaaaaccaagagccacagtttcctatttaatataatgagcatgcttgacgttgccctgagagttgcgcctccggggccacgcgttgcacagacccgcttctgaagtggctatatcctagctttaaatctatcagctcttttaaagctatgcagaccgatttggctcacaattgtagaattggcaactacatttgtatatgggaatacatagcagtgcttgattcatcctgtataccatggcgcgcagatctataatgtagagcgggcctgatccaaatcccgaaaataaggaaagttctcttagtttggatgtaacaatgaagactggaagtaccatgttactccgagaggctgcgctcatggacttggtaagatactgctggcacagcgattttgagctaggttaagtttgacccactacttcgtagtatgtgacgaatatttaattcaaaggcgcttatgcgatattcatcgtctgagatatcccttctgttgtacggtgtatattctagtaagcccagcaactagcctagttgcagctgtatgctagatacccggagatgagaccttactagggaattgataagcacactctcaaagcccggtcacgtacatgcattagcatgcattagcatgaattagatttgctatttcttttaggctgcaataacaccagcactagtactagccggaagtgctcggcgtagagaactcgtgactcggagatcgagtaagatctgcagggtatgaaacccgctaagcctaaaagaggggtgtttggaagacccatccggtgtggtgcaggagttcctactgggcgtgcagtgtctgagggagttagttacacgattagtttagtaagagtttgcgtgtacatcgtggatgttggatctactagtaagcacattaggaccgtctttgcaatatgtaagtacagtgttttgagcaggagtgtatcgaatacggttgtcagagagaaccaagaagaagcatgtattctagagacctgaactacccaatgtttcccggggatagcatcactagcaaatgcgacactcgggaagacggtcttgctttccttcgcctgcaagaatggctcaatgaagcctttcaaggaaaacgtttcataatcgaactcatccatgacgcctgaataagaactggagggagagaaaaaaggtggagacctacacatcctgaaacagccaggtcgatatggtaggagtcaatgtcattgtagtacaatgtcttctatgtccaaggagcacttgccttgtttcaagaaagaaggaagggaagagagacccagagatgctggtaggacaaccgggccggatccggatccgaaccacggtacggagtagggtaagagtctatcccgagatgctccatcgacgacaataatagtactcgtatattgtacagttgtcagtttgaagtgagcgtgtcagaaatatgcccgaaacagcgcacagaccgaagaaattagcttgaggtttgagtgggcagttgtaatagaatggtagccgacagatttccgcagaacggccggaacgtaagaagagcctcctgagctgtcaattcaaacccgaaggctacaaataacatacacagaagagtctatatcgtatattaagcatttccccgaccttttttgctgtataatacccaaaataggccaagaatagggagaagatctctaaaaagaccaccatcgagcactggagtctcaatgaaaggccattcttgtctatatcaacacagagtaacggctggactgattttggtgtacaactatattgtagcaaggagcggacttgatatccagtgctaaaatgcaataaccttatgttttgaaccgaggatgaaggtgtggggtcgaggttattttgccatgcaaatagggaaactttgccgaacccaatccgtaagaaaccgaggtccatccgagaggcgtaaaacaacaaatcgctcatcatgttaacggggccagtaggatgctattctcgttattccggagtacagcatacggagtactcgtatggagtatcgactggatcgcttatgctcggtcttcgcatggatgatatttgttccggttcgagaggcgatattttgtttcggatgtcctttgttagccgttttacgagtatggctgcagccatgaaacctctagttaactagctgcgaccgtcaaaaggcacgacttggagcagccaattgtccggcgaattattagcttgtaaagcgggtgtgcgaactagtccgaggcgctaaaatattgtggacctcaccaacgtgtgtgagcgggtacagaacttgcttcctaagcgtcctcaagtgtccagcccttgacgagagattctagactttgactttgggcttggtggctgtaatggctttaattatgctggaattagtggggttatctgcggcagatctgaccatctcttccttctcatcaacggtgttgcatctgcaagtttattgtagtcgcctccgtatgttgtactattatttaatttacggaggacgacagttgaccggagagaactccgtatttttcgtccatgcttggcttcctatttgattcaaggcggggctgttgtgaaataggaagtatcggcagggtaataattccactgctttattctgttaaactcagcggagttaatgcactccatcttcgcgcgccacctttttggttttgtccacggaaggagctggtgtaggtttccagcgggggtctggagcattacctccgtcgcacgggcggatgttatgaccaaacaattagggccgtcttcggcggattcgaaagatcgtcaggaggggcatattgaagtgtagtattgtggaatgcttggacttgtcggtgtggatgttctagcattatgggagaagacggtgctcgcacttcttatgtacaccatactaggatacctaacgcagtggaatctctggagttccaaggttgccgggctagggtttgatgagtcacccagcgaaaccgaggaaaccagttcctacctattgtaggtaactatgaagagaagaattaatctgattttatctagccatgttgtatgtatgttgtacgctgagagagaagaaatccgaaagcaattaatatacaaaactgcaaacgggctcaggatgaggggtttcggatttccaaggaaagtaatccgtggggatcgtgagtttccccgtgcaacgctttctattttattctcttttccctgggattagggcgaataagcaagataagctccgcagaagggtctccaccgaaaaattttcgaagcatcaaatgatcaggaaaactggggccactgtgagggtccgaatagccgctactccgggaatttcttttgcccctttttagccttggatgatgaggtgggatggaatggtgatgtgaacaaagggaataaattgtggaaaatattctaaaatgtaattcttcacgaatatctaacttcctggggtagaatagtctaaagagcacgtagccaagtcttaaacaagaagaaaaaagacgagacccatcagagcctggaactcagggaaccggtttcgtgatctggtgacacggcagacccagggcgcttggaccaggttccccattattcttcgagggtataagactcgttgcgcattcccacctttccctagcctttccctttggaacttccccccaggacttctacacattccatctctctaaaaacatctcgggaatcatctctctatcctataacccggtctatgatccccaattaaaacacaatgaatactgccacgcaaagaacacccaagaccccgaaaccaaccgcctccgtgccaattgtccaaaataaacgctggccccccatggcgaaccgaaacgcccttccctacaagctcacccacatctcgaaagagaaactcgcccgtgaagccaccgcaccagaccctgacctgcgccgttgcgtggctcacttccgcctgcactgcgggtccgtctcctggaccgagaatgacatgaagtctcggatcagctcttttgatttcgaagacaccgatgacgaagacgatatggaggagatcaacaccgaactgccggtcctgaaaaacagagctccggccaacgacaatacagtcgaagtcaccgaacaattatcatacaaatcagagcccgtcgctattgcggctaccccggcatcatcaacatcaccagcgtcgcctgaaaatcccgagcatggttttttggaaaagggtcgcaattgtcttgaggcgacctccaaacatctatggacagggggatcttgcatagtttccccaatcgcgggttaacctcgccgccccttcctacattctcgacttgcccaccttttttctctcttgatcctttgcggccgacactacgatattacgacttgatgaccataatgaacacaccaaaataaaccatttgtatataactttacttttcgacaatatgtcattcataattaccaaggaaccttttttttttttgctggacaacctgtttttcttattacaccataaatatcgaataacaacagccttatggcctatggcccattcaaactcggaactatttcctctttcactcttcacttccccaaactcctcactctcactccccacatgaatctattcttggaggttcccaacccagaaggtcaagcgaagtgactcacctgccgcgtcgccccaggtcacatgacacatacccgagaaatgaaaaaaatagaatctgacgatctccaagacgccaagcaataatcgtcaatcctggagaactaacgcaggccccaaacccgagaattgggggctgtggaactatgattttcgccgtggaatccaaaccagccaggaagaattctgtatggtggaaagtcgcagatgcagtggcgaatcacccgccgatcggctcaggtttcatcatagtcatgtcacattctcatattgaacggtcaacataccccggcttcaaatgacatcccattatatccctgccatcgttgacaaaagcacccgccaataaattggtctctatcaaactagtagattaatggcctgacctgacgtcgctatgatcctcccgatcgttgtcttgactgaaattgagttgccagaatgaaaacaagaaacacaaacccttaggccttggcacacaagtcacttcagaacgtcactcacttccccggaacttggtcgctgctcggccgaaagtacatcgaactaaatctgacacccttcttgcatcgacatcgcgacagcacacagcgatctccaggcccgcagagctaccgtgcacgcccgaccagcggatccgcccgattggctggatctattttctctattccccgtagcaaaagtattccttcggtgaactctcggcccgcgagctcgagcacgatcgacgtcaatgttcaaacatccctggtgttgtttatggatgacgctggctggctggatgccgaggatgaacgtgcggacagcggtttcgtggaaagtgggtaggacaatgggcctagtagggccgatgtatatatttgagtttgataagggccttgtgtcgtggtatctagatgcttgagtatcatatgttgtttcttggctatcgggtactaacaacctgagagtgtgtgatgatggattgattcggtcattgagaagtggcatgttatctaaatgtgttggatgggccatttacccggatgtttctatcaatttaggatgtaattgtgttggtcatattgaaatagctaaattgaatcaagcatcactgccataaaggtcaaagagcaagaccccactcgttcagtagtaggtttgtcccctcatggccattcgagtctcaggctggaacatcctccgtgtctcatgtcatgccccagcgccttcggaagcttcatagcagcctccacagaggcgatctggacggtccactacccacggctcagatctaaaactataacgacagtctacctacggtagagatctaaataccccgcaggcccatccccgcagtctgtgacgaaaaaggtcactgttctaaccgagatgacatttccaagtgtttactgcgccacaaaaggtctagatcgcatggatatagttgtatctggggtagtctctcgaaggccgctggcatatatacatatatagtaaggcacggttcgttgcataggaagtatccttattctacgaccactctgtcctagttgagagatcaattgtatctgtattcccaatgtgctggttgatgccgagcctacaatgaagtatgtagtgtgtcgtttgaactttaccgtctttgtatcgatagttcaagttagacctttaggtagcataggagtgtctgagcaagctagcgatcaaatacctctcaagtctcagtagaaagactctagtcatagccaaactatgaggatttactgttgctggtaagtgttagagaccaaaaacccgcagaaagtgagtccaaatgcaatgcatgtccatatgtggcttagctcgaaaatcagtgaatgcccgacacgcatcttcctgccactccaacaacgtccatcaaaccccaactagcaaagatcccaccgattccgcaattcagtatggagagaaaactctcatcgccaatggcacccacattcatggtgtccgcaccaggaaaagccattgtcttcggtgaacatgccgcagtgtatggtaaacccgctattgcggcagctatttctctccgatcgtatctcctcgtcactactctctccaaatctcgacgtaccgtccaactgaatttcagggacattggcttaaaccatacgtgggaaattgacgctctgccatggaacgtcttccaccaacctcccaaaagaaggtcgtactactctgttgtcgagtctctcgactcgcaatttctcgaagctattatgccacacgcagaggccgtgtcaaaagacctcccagagaagcagcgaaaaatccatataaaatccgcaaccgccttcctttacctcttcctctccctcagctcctcggcaagccctgggttcatctacactcttagatctactattccaatcggggccggtctaggcagcagcgctagtgtttgtgtctgcttaagcgcagcgctactcctccagatacgcgcccttgcaggaccccaccctgaccagcctcccaaggaagcagcgatacagatcgagcacatcaatcgctgggcattcgtgggcgagatgtgtatacacggagaccctagcggggtagataatacggtctcggcgggtggaaaggccgtgatgttccaaaggaacgcctccggaccaccatccgtcattcgtctcaccaagttcccgaaactacgactccttctcgtcgacacgcaacaacaacggtccaccggtgtgcaagtagaaaaggtcaaaacactcagcaccaaccaccctgaaataacagagataatcctagacggcattggcaaaattgctacttctgcactggatctgatgtctttggctgatgtttctgactctgacgctctcggacactgggggtccttgattgggatgaaccacgggtttttggtttcgctaggagtctcgcatccccgtctagagcgtattcgtgagcttgtggattatgcgaatattggttggacgaaactcaccggtgctggaggcggtggctgtgctatcacgctgttccgaccagataccgaagataaaaccattgaagaactggagcggaagttcactgcagaaggatttcaaacatatgagactatcctaggtgccgacggagttggggtactttggcctgcggtattccgaaatggcactgatggggaggccgaagagattgatcagaatacgttcgaaaatgccgatggcgttcacggtatcgaccagctggttggagtgggagtgcaagaaaatcgggaaggctggaagttttggacgcgagatgtttctccaagatgaaacagagtcatggtcgaccagcttttacctcttgcaagtgtatggtaagctggattggtgtttctctttatttcggggttcattaatgactgtcattggtctcccacatagtggtcgagtcaccaaatttgtaattcaggtccatatgtacatagaataattatagaatacacaaagtaaataaagggcagtaagtcgtagagtcagtatatctagtgcaacaggaaccgcgtaggtgtctcttgcgattcgagctccaacgagactgactttttcctctttccagggcgatagacgagattcttcaatcctttattgaaattaaggatacacgacacggagttggcgacggtgaaaaccatcaaaaataacgacaaaactgcgaataatgttagggacacccggaaagagttgaaattagtgctctccgcgccgctgtaaattcgaaggaggatgaggataaggaatccaattataacaatcataaagaactagatgactggttagttgcctgaatattacctcgcaatcgagaatccttaccatcatcagtataagcgatttggtcttctcgcgcttgcaaaattgagccgacaggaccagggtcactatcgtgactgggatcaaacaggcattgatgataaaatccatgttttgagcttgaaacacaacaaggaggatttggagttgacttccgaatacgaagaagaaatcgaatttcaggagagtgatataaacctagaagaaatcggtcagtcacaaaacaaagaacatcagcagcatcgcaacaaacctgatatgtaaaataccgacgcttcatctgcaaatccgcactgatgttcttgtatatagaccacgaaaactccgcgcgcaacttccacgtaaaaaaagccatgcacatagtcccgatgcccaaaaacaccgggacaagaatgagctcgacctgatacaatttccgcagacgctcgccgagggcttcatcagccaagctggagatcgtatccttgatctccgtcatctggagaatgccatatgcgaacaggccctgattacagatgcagagaccgaccagctggattgtgttcctccggcgcagcgcgtcatatgacagggccaattcgtatataagcgcaaaaatgtacaggccgaggaatgactgaaggcgcaatcgtccgtttgatatgctgtcgtcgttgaggtcgtcccaaagactcatgagaatccagctaatttccccataagctccatgttaaagaaggggctgatatccgagccgggggggcccctacctttcaattgccactgtcaggaccgtctcggtgatcaccgttgcggagaacgatcgcgtccataatgtgttggggacgtatagtagaggccggctgtggttcggggccttgtgatgttgttcgtcttggttcatgaccggactgagtggtacagaatatgtgcagatgtctgattccttggtcttggaggacttgtcgtaagcatcgtcagatttgggttggaaggtagtttggaaaggcccagagatcatatcaaaattgaggggaatgtggaggttaagcggttcaggctattttcccttttcaggagtttcggtatatcaaaaacatcccaaactaaatacgtctgcctccttcacagtggggcgaccacgtaaggccattttagatcaaagccaaggccgatctagtggtgtcctagttgcaattgacttccactaagctgaaaaacagagaagctacttgtatctttgtatgatgtacaggacttagtcggccgttacacagcctcatgttatttgatagatagccgtgggatattctttacagaataatttttttttaggtattcccccttttgttggtgatatagttagaagggtaagaatattgaaaatatgtgaatcaaaagaagacgcgtatctgggcttgacatgcatgagactaagacataaccttccaggggaaacagcatattgccccatatctgggcaaccttagctcgtgtttcaggtaaactgtactaataatagattgtactaatcacattacgatgtacggggtaaaacatggttacaacataggtacttacatggatctatagcccttggtcaacaatagcacggaatgtctaagtcccttttgtgagaccgggatagaatgtattgtatgagtatgaggatgctaaaataatgcaatgatggggatatatccaaaaagaatgcaacaatgcacgccatgccagtgcttcagccgtattgaactcccaggtgtacccgacaccagtacaaataaaacagaaagaaggagagataacacagcgaagcaaaaaagcatagaaaaaccgcaaaatgcatgattcatgagcacgggcgtgtatgcatcagaaattaggattagaattccatctcgtcatcccagcccagctgcgcgtatatcgatttggattgggatttctcgggagttactggcacaactgcagcacctttgacgggggttcccatgaccgcaggtggggagtgagcgcgaggactctcggcgaccatggcatcaagcgatagagaaaacggcacagcggtgggagtagatatactctgcggtgcctgtcttttgggtggcgtctccatgattgccgaggtgcgagcatgattgagagactggctgaattgtcgagatgatgtcgacaagttttctatgaatgcggacatgtccttagggcgtgaatggttgggggaacctgggactattggttgtgtagatgagcgaggcgctggaaggttgggtaccctgaaaaggcccttgccggaggaggatgatgggcgacgcgcagttatgctatcactctggaaaagtttggaagatggcctagttggagtttcttgaatagctccgtccagatgacttgatcgtggattgtcatgagaattgaaaggatcggagtcagcgccagagaatgagatcgcccgtcgactcgaggacgggatcatggtgggagactcgaaaggagaattttccacaccagcaaatgaccgggatggagccaggctacgaggtagcccgacccccgcgtccttccttcgattgcctcgaggagtcgccatgacctgtacaccttcgccgaacggattgcgcacgggatttcttgacttccttgaaccgctgccacttacaacccgtttcgacgcatcgtctgccagatccttggagacgagctctctgttcggcttccgaagtgcgttaatagcagcatccagctctttcttctggttggccagcatttggacctttctcaatttagtctcatgctgtcgtgctacggcgttaagatcaacctcgcggttttcggtgcgttttgctttctgaatgccaccccggacactgccgctgagaacagtgggcagcaagggttcaatatcgtgcttcgcattatgctgggtcggcgcagtgttggatcgagtcagtcctgggtgccgagcataggacgctgccgctttatcgtccgtaagtactcgctgtaatgtccgtcggggcttcggtgcaggctgttgtcgcttgacttcccccccgggttccacacggcgtgatttactcgaagattgtgtctttttagcagccgaggaaatactgccggataccccgaatttgcgggtgatcagcttgcatttgtccgggagacgcgcagcatagaatggaatgatgacttctgtgcagaagtcacgcaccgcatcgctctcgactttcttgcctgaaagatggttgctactgaaagaagaagcctttgctgtatcggcggccgatgtttcttccattgtcacagcgtgccaaatacacatccgatcgagatggagttcaagaagcatgttcaaatccgttggcttcttaggcttggctttcttcggcgtatcttgcgccccatttacatctttctccttgttagtgctggaagcaatggtgatttccaaccccatgacttccaaaatcagcaggatctgcaattgtgtctcgcggaggcggagatccgaaatctgtttcttagactctgcttcacgcgacgtttcctgtgcaggatattcattcaagattctgtccttccaccacttgtggatgaatccttcctcccctgggtaaaggccattcttccccatcttctttttcttacttttccgcttcttagattttgcgccatcatcagaaagcgcaagagctgcatcgcgaattgccaggggcaatgtttctctgtatttgaggtccattttcttcgtagcgaggatagcctcgcgataggattcgatcaactccgtcgagccatgaggctgttccaagtcacgagcctggaaagcagtccgacagcgtgttaacgggcccttcgcaaagtacgccacagaagtctagaaaatgtcagccgggcaaactcctaatatcgagtagagcaaatcacctttgaaacgtagagagcctgcagatagtgctctctcatcccgtccagccactcctcaggcgactgttgcacatccacaacattggaatcgacaccatcagcatccatagccgcaggtaaatcccccaagccctgaggttcaggaagcaagaaagagcccccttcaacggcatcaaaactcctcgacggagcaagcgaatggctccggtgctctccatcacccacaaaggatgcctcggtatccccgaggtccgactcagacggaccaaagacaaccgcaatatccagcccagcagacctttcactcacctcatcgtcggagaagggctcatcgatctgagcagcctgccaccagtcaaacccatcgggaatagccccggtctcatcgacagcaacgctatctatatccgcagcatcagttccatgccatcccttggccgcaacaactagattgccctcgtgcacccatcgggcgagcttggagagcgagtatattcctctcttcaccctctcaataatgtacaggccaccattgggcactaggcgcactgcgaggacgatcggttccgtctttacgcacaagtcaatttctaacgaggggatgtccgcggtgaaaaggccgccggattgatcgtcggatcgggatgcaggcgtatcgtcgagccacgagaggggcagccttgtgcgggggagggccgtaattggttcgaggatcaagggttcatcagataaagacgccgagtgagcctatacaagttgcggagagtgagcaatagcaaccaatggattgagcgtatgctgagccagttgtaagcatgactcactctaatgacgatggaagaggtagcaagccgtctagaagtatcatctagcagtacttgatcgtctcttttcctcttctttataggtggaggggtcggttcgtggagtttgttcagcgcggatgaactgagcggatctaggacgttggggacaatgcgcgaggccatggtcgcgtctaggaaattgtgggcattctgtaatttgaacgcaagagtcaagtcttatgctaaagcaacaaagcaattgatgttggttgtgcaggtgtcgacaagatcgcgctcgaatcttggcggatctggcgtcacgcgtcgggacgtgtactccgcctggaccaatatgagacacgttaattgatttcgctgaactggtcgactgtttggcctgaaaagaatttcgcctaggtttgagattactttcttacaagatcgagtacgttaagaatacctaaactagtggtatgatagcaagaacaatgtgaaaaaaatgggatgaaatattatgaatctatcgctaatgtttagattagcaggcccaggaccagacgaaagaacttcaggtactctcacagagtagtgtgcagttccctcgaaaccgagagggcatgatcccgcgtggaagcaggaccaaaatctcctcggtaggtaccatggacagtgaggtagagatacggtgttgaagactgtcgctccagaaaaacgccaaaaacttcctttcccagccgatgaaaagtggtatcatgttgaattttgtcttcgccgaaaaggcccgtcatttgcgcgaccatgcagataatgaaacaagagaaattggtctcctagtgggaaccaacttccggattttatgagggttttttatagtctatgctcatcgtgcttcgagttgttgaaaacaaagcaaatcatcacagtcgtcaataattgtccggagtcaccggatcaagcagagcccgcttagaacttgagggtacggggtgactcccaggagaactcctggttagtgaagtggccgttcttggcggtctggtagtagatgggcttggccaagtcgaggtccttcacgatgacaccgggacggagatcaaagttgtcacggatgatctggaccagctcgtcggaggtcttggaggaagtaccgtaggtctcaacgaagatggagaggggctcagcgacaccaatggcgtaggagagctggacgagggcacggcgggcaagcttggcgttgaccaaagacttggcgatccagcgcgcaacgtaggcggcggaacgatcgaccttggagtaatcctttccggagaaagcaccaccaccgtgggcaccccagccaccgtaggtgtcgacgatgatcttacggccagtgagaccggcatcaccctgaggaccaccgatgacaaagcgaccggagggctggatgtggtagacagtgcgatcatcgaggagctcggcggggatgaccttctgaacaatcttctccttaatggtggcacggagctcctcagtggagacatcgtcagtgtgctgggcggagacgacgacagtgtcgacgcgcagaggcttgacggcaccgttgtcgtgggcatactcaatggtaacctgggtcttggtatcggggagcaaccaggggatggagccatcctgacgggcggccttcatggcagcattaagcttgtgggcgaggaggacagtcaagggcagaagctcaggggtctcgtcggtggcatagccgaacatgataccctggtcaccggcaccgagcttctcaagggcctcctcgtagtgaagaccctgagcgatatcgggagactgctgctcaatggcaaccaagacgttacaggtcttgtagtcgaagcccttctcggaggcatcgtaaccgatgtccttgatagcgccacggataatcttctggtagtccaggtgggctttggtggtaatctcaccgaagaccatgatcatacctaatgtgacacgtcagattgagatctggcctgaagtaattatagtgaacctaccggtcttggtggccgtctcgcaagcgaccttggagaggggatcctcagcaaggcaggcatcgaggatagcatcggaaacctgatcactattggggaattaatacactgttacaattggaattgatggtacagagcccatctaataatccactgagggcaaaggtgaaaggttttaggggtataactcacgcaatcttatcggggtgaccctcaccgacagactcggaagtgaagaggaaagtgccgctgtttgcaactgaacccattgtgacggtgtgtggaagaaacagaaaattgacagaaaaggaggcgggggaggaatgaggaatggagagaggagagggaaagggagaaagatatctcggggagggggaaccttggtggggttttgcttttttttccgagttacacaggcggtacccgagaaaacatagtgtgcgtgggcgaaaggcaaggtactgccgaagtaccctctgaatgtcctccgtacacggtacttcctgtcccttgctagcccgcgatcgcgccatctggggcggtgaatatgggcagatcgtctggactgcaattttcttatgacgataagatagaacattctaaagttgaatcttcttggtactttttaacatacaaccatgtccaaatttggtgtcctggtaatgggccctgcgggtgcaggcaagaccaccttcagcaatgcaataatccaacaccttcaaaccacccgccgcagctgtttctacgtgaacctcgaccctgccaacgagacattcgcctacgaaccagatctcgatattcgtgacctgatcactttggaagatgtcatggaagagatgggcctggggccaaacggaggcctcatatactgcttcgagttcctactccagaacctggaattcttatcagaggcattggagccattgagtgaagagtatctgatcatcttcgatatgcccggacaaatcgaactgtacacacacattcccctgctaccaaccctcacaactttcctctcgcgacagggcccgttgaatatcaacatgtgtgctgcctatctactcgaaagcacattcgtcatcgacaaggccaaattcttcgccggtacactcagcgccatgtccgccatgctgatgatggagatgccgcacgttaatattctcagcaagatggaccaaatccgcgatatggtgacgcgccgggaattgaagcgctttaccaacgtggatgtggaattgctgcaagagaaggaggaggacgatctcaccgcaggtgccaacccaatggccgcggaatccttgatgagcggcgggtctttcaagcagctcaaccgagccgtcggacagttgatagatgatttcagtatggtttcgttcctgcaattggatgtttcggatgaggacagcgtcgcggcgatagtgagccacatcgacaatgctatccagtaccatgaggcccaggaaccgagagaacccaaggatgcagtcgaggtggattatgaggattgagggatatcacatatgattactgcatcactgtgacttgcagcgaattctctgcatatacacccccacgaccgaccactctacccaatgccactccctgcagcagcctcgagttttcggcagcggagcagtctgagataaagcgcacttttcatctccgtttgctaatgtacggtcttacgatattggaaaagctttctaacgttcttgtcgcgccggactccacagaatttggggcttcctcgacgtttggaatcaataatacttacgataaaatcatggctgcgactactagagtcagagccaagggctttctacaccacaaatggatattcggtcatatcctcgggtaatagaaatcataatgaaaccaagatgagactaaaatcaatccatgaatatcgtgctctttagaattccaaaaacaagtcgttaatcgctagcccaactcaacgggatgaagtaaagaataggcagacccatcgcgcagtttcatgatataccccaaacagggataccagccgcaaagaaagacatcaacaagccgagaatttcgactcaattcccagcacacaactattccaatctcaccacacgtccacatccaatcccaccgaaaaacctcatccaacagccctataacagaccaaagcaaaccgaagtaccctacctcgggactcccgcataagccgccgcagccatcttagtcttttcctcaaaatcgccgacaaacccacatatcagaccccaaacccacccgacacccctgcccgcattctcaataccaacgttgtagacataccagccaagacctagaaccgagacccagaaaaccagcttgaaagcgagcgcgatccagaacatgacaaggcggtaggcgtagtcgaggatcttgatagagatgaggattatgacggcgaggaggaataaggacattaggtctggcatgacggaggcgtagacggcgaggaacttcgagacgggttcgattatgtatggttgaagcaccattgtccgtaggtgcgagagttttgttgcgagatggtcttgtgctgttgcttggaggtaggcgaatgtcgaatgatggaggactgtttggaggttttctgtgtccgggattattggttagcttttgcggtgtgggatttgtatctatatggctggaaggcaggttaagtaaatacctggtagcaagtccatgatcgcgtattggagtatatttgattgttgaagaggtcaacgagggagagacaggggcagagagagaaagagagaggttcctcgcgtgtcaggtccgtgtttttctttggcttgccgcgctttgtttgagaacctcggctcttggtgacccttgagaatggattttcgagggaatactggtgtgaggcagaggaataacaccctggctttccaacgttcaaaggcgttgtttctttccaaggttgactcgagagcgcttcgtaaggtcttgtgctggagctctttgtttgtagtagagcaatgcgaggtggagggtacgtgaggtgtgttaaaggtcagctgcagcggagactaggagatgttatttctgaaggtatatattccgatgcaatcaatgatgaatggtaggccaagaagcgaatgcgatgtttaagcttgggtgtctaagttgtggcacccagaggatgcaaaccaaacaaacttcacatgtgaagagatgctctactccgtacggagcacaacatacttggatctatagcttcacttatacattgctctcagctaatctcggtatgtttcatgaatattagattcattataaatgatactgtacagtagattagatatttacctgaaaagagacgctttctatatacaagcgcgaccaacaacagtcaaccacgagttcgtgaatgtaaaagacaaaacgctccaagcccaaattggtgaagaggccagcgcggtgccacgcgcatgatctaagatgaaccaaaataaaaacccgggactccgggctaactccaatatattgtactctaccatcgcgggcgatgggagcacaaatgcatatgcagacatggtatagtaagacagtaggaaagggcaaagcgcgagatttgacaaatttacagagcatcgatgagccctctgagggcgtcacgctcagcttggatctcggcaaggagttggcgggtttggcggagagcgtcatctctgccggatgagttagtaaagatgggatgaaaagagataaccatgagataaaacacaagttacatacctgtcagtttgaagctgagccacatcgatctgcgtgcggttcatacgtccaaccacttgctccatctccatatccgcatcacggaggagcttctcgagatccttgactcgtcgctcgaggatttcggattggacaacctgggtcaagggtacaccctcaccgctggtggtctggtccaggcgcggcgagcgagcatcgaatggtgcgttgggcggccgcggggagaggacaagtgtgttacggccgccattcatcatccgagtgagctgcgcatgctggctttccttcagcaaacggagctcgtcctcatgcttgcccatctcttcttccgtgtggttttgggcaaccaaaagaacttcctccagctctctcatgtggttctgcagaatgttgatccgttcaacggagagctgctgatctttgtcacctttatcaatggctgttgctagacgggaatgcagagaagtattggtctgaagctggtaatggactttgctgcccagtgtctcaattcgaataagggaggaagcgagctcctccgaatccgcaacacctgccttagcctccgcttgatctgcttgcaatttctggaatgcagattgcagggaagatgatgtggtcgcgacctcagcaaagccttcttggccggtcatcaactctgcaccagcggcagtgtcctccacaagaagagcgcgcagagagctggtctcctgctcggcacggtccaagtccatcttgagaccagcgaggttcttctcgcattgccacttgccatctagagcatcctcagcgcgcatgcgaagatgattcacctcgtcacgcaggttgcgcacatctctctcatagcctaatttccgtggctgacccgattgctgcgctcgagcaagctccatctcgagcagacgagtgcgcttctcgtactcgcgggcctggtatgcctggcgatcgaggaggctccgcaatgtccggtggaggacatcgcgttgaacctcgatatcgtggaccttgtcaaccaatgattcacgtgtttctggtgatttaccaccgctgttattattcacggagttggatcgagaaagtccacctgagtgagctaagctgctgggcttgcgtgcaacggagctcgatcgtctcactccaaatgccgagtttctgggtgaggccccttcctcagcgattgaagcgaatcgaccaccctgtagctgagccaaagaagcattctcgatttttaaagcttcaatttcctcaatgagcctgttgtcatctcgaagttgatctcgatcatttcgcaattgttccaactctacccgcatggcagtaagtaggtcctcaaagttatctttggattgccgctcttcaagcagcttccgcttggtgttttccaatgcggtctcgagttccttggttttcgacgacaaatcagacgtatccgttctgtcgcgtcgaagctaatgaaggttagcagttggtcacatttgcgccatagtttgtcagccgtacctgttgaacttgagattccaagatttgaacatgcgattctgatgccaagcgctgagaccgctcctcctgtaacttctgcgataattcgaccttgagttgtgctcgttcttggtctgcagctcggcgaatcttttcgatatcttcgctcttcccagcatctgatgcatagcgaacagagctattacccgagtctgagaaatagtcacttgtccgtcgattgatgtccggaccttctaattgtagccgttcgactagatcctccagatccatttcccggcggatagatctcgctagttcggagcttatctctcgtaattcattctcaatgtctgcgatcttggatataaatatattttcctttaaacttgaagaccccattgaggtccgcgctggatgaccatatccattggtcttgggatcgtatggagagccggggttgaaaggaacgtttgctaatggtggcatagggaaatgtgttgctgatcgaccggagtcggagatctcggtgctcgatgattcacctccgggagatgtattattccccttccagccgaagaaggagctgatcttgttcccaggggttctggggttccttggatctcccgcacccattgacattgataccgcacgcgagtctactttgaaatgtagtggaggtggtctgttcatagacatgtgtaatgccatactcgttgcccgtcgtgacgatcgtttcgttagaggaggggatctgaggatcgggatgaatggttcgctatctagacgactgtgcagaggggttccattcatgaactgatgttcgtactcttcgtcaaagtagttggaaccctcgtcttcgtcgtcgtcgtcgtcgtcgtcgtcctcaagcaccgatcttaagtacgaggcggaaccgtggcgggatgcagcggtatcgatgtataggggttgagaatcgttccgtcctcgcgaatatctagagagttgggacagaggcacgcgattagtcttccagactttggagaaacggaatagcatgtgtaggccatatcatgcttgatcggtaggtagcccgggggagaaaaaaggagggtctgccgaaaaacgcgggagaggaaaaaccggggtcatgctggtcgcgtacctattagagttctttggcaccgatatatatgagtctccatccaccgacaaaggggagagtggtgcagtgggaatcgaaatgggtttatctccctcgaacgaaatgggagaggagggatgatcagggcccgaagtcactggaccatcattatgcgggagaggtttcgttcggactggaggagtagttggaggggggttaggactagagaagctctctgaatgggcgggagagccgccaaactctagaggagacgccatgaaacaccctggtccgtatcaaaaaatagccatggatcgacagccgttcatgctgataagcacgggaaagagaatggcaagcgccaatgagacgaccaaaagggtaaggattattctaagaggatatcagacgagaagggaaatgggagaaaaggagaaagtcttggtacacgacaaccccgggcgattggcgcaaaccgcccgtgggttctccatttcagtagcgctggcttcgggacgagtaagcgtgggtggagcacaaggggggctggcgtgggtctggatgtgcatcaattcaattggtacgaatatcatacaatgatgctttggccgataggatcgacatcgcttgagaacctacttcgtatgtaccatgcagcgtggcgatacgcttgacgtccttgatagtccggacctggtaagatgtgtataatatacaatgtactctgtacggagtatatgttgtatagtactatatggagcacggtgataaggtttgaaatatgaaaatagaacattcaatagtgtcaagtgacacaaagaacccccttgagtcgtggagaggagaggagagggagaggttagcccgggtgaatgcttggcgattcaggggtagcctttcagggctgtgggaagtaccgggaatgtacttttatgtcactttccttatctttctcttgaaaagatacctccaagtactttacgtctactttgatgtttgacttggtagccctatacaatctactcagtaactactctgcgtatctgaagttttcactattaggaggctacatttatattagagttgtgtatttcatacggcttgtatataacttcaacggactatggaaactcaatataattgtctgcagtatattaaggggccctccgaagacagtggagataccccttttccccttccctctctcgtacaagcttctcaattttgtggaaaacccaaggccataccctgccagaagaacgtgcacaatccaacacgctaactacggtatgtccaatcaaagtgagacgtcgatcaacacagcgtctcgccagacactcgggccagcgcgtggggccggaatgtgttgcttcaacgggctaagcgcccggcctaaagcacctgttcctgcatcgtgtcacatcaggaagttggccaatgtgattattgtactttgtttggaagaccccgtacggagtccagtccaccgatatgagggttagcactgaagaccccacctagaaagacattactacttactgcaattcatatggattctttccgcggctggaattgattggacaaccatatgttccttgcttcagcttaggacccaaggatccaactctactgtctacatacaacatacaatcccccgtgttgtgaataacggcctagcagtaatcacacactactcttatttgacgttagggccgagaatacggagtactattaggttatacaattattgtgtcaaccccttatcgatctacagggtttattcagggcgttgatgcgactgctcggactcgctctttgttacaccctaaggagataattgtttcactggtacaatatgtggtaacattgaaattagactaaatgttaccatcccgacaaatggaaatatttatatgaggtggcttgatctattgtatgaaattaagggttctaagatgcgtacaacatagggctactccaggggtccaccatagctgtcacagactgagttgacaggacggaggatgtaccatacggagtacggagtacacagcgctaaactgttgtctcagtccacctgcacgtcaaagaaaagttggcttatgcacacccgtttgatccactcccttccagtctagaccatgtctcaacctttgaagctgtctcacattcaaatacttaaatcccagccactgctgttctatcattagaagtagttgggagtgtccgggtccaacggctggctagatgtctcgatgctgcatttacgctgtttcaggggcccttgctgtatgcacatctctagatatgcaacatattggatgcaatatctggcacgtacgcattataggtatggcggtgagcaaacctcggcctcggcgcttccctttaaaatccttcgtgctccctctctttgatcactaattcagactcgtcgcattttccagcttcatccacagtggttgagcattcgacaaggtttgtgcatacggctggacccactgcagacaaaggcgatgggattatcctagccacctcaaaggttttttatggggcatctgttcgccggttctgatgatctggaggatcccgacgagggctcaagcaaaatttacagtcaaaacacttaactaactggcatcctaacaccgatatactcgttctgaaagttcccctgtgaagacattggattgcgtcgaatgatctaaatcaattcgaaaggctaatgcttcacatcgacgaccacaagcactgccgttcgatcattgagagtgagattcatacaacgtgatgatgaactgggcggggtttgaactgttataaggtcttctaagtctattccaccattggtgttcgacacttagtgtgtccttattactatccgtactaattatttttgccctgtgagctaagagaccagtaaacagtaagatataattcaagggcaaaatatcggtaatattatagtagcccaatgctaactactagtaactactggtcccatttactctgtgagcctgcgaccatgtcattcgacaatttcaacatcgagggcaacatgaacaccacgaacatacctttcgccgtgaagcgaggcagtaaattgccatagttgatcgacaagctaaacgaaaagagattaatacggcatttcaaaggcgactagacgttcatggaaattccaccgaccgcggaaagctctcttgaaatccgacctaggagagttagtcttcaagcatctcgagatgaaggcatctagctgacttgcgattatccaccgcttgcttgctcgttccaatgattcagttaccggttgcaatacctcggtcatgtggttgaaatgcttttccagccaggcagctaccgttccagccttctgaagtaaaaagacggccgccaaaggcattttgcttatgctgagaatgtcgtccatacatgtaatgtcacgagtgatgttcaacgccatttctagagctgctatagacgactcccggacattattctgtctgcctgggacgctaccaaggcacatcagccgcttcttatgaagttcaatgagagctctacttccattagcattaaagaaagatatgaccaaggggtgactcacagaagaaggataattatcgctctgtatggtcgctcccaatcctttccagagctattcaaaacgtcgaccgtatgttttcgaatcaatgactcaattctccagaaatcatagtctgtcatttccatcatggagacgggatgaatctcggttaattgtacgacttgctccagaaaatagacagcctctatctgctgagcaaaacctggaatggttgttcccattgcgtcagagagcagctttatttccggatcccagggaccaaccccagtatgattgctccatagctcatcatcaacaggaagttcatgcccgctctgagagctctgaacgagcaaggttcgtccagaactctcatcaaagtgatagaagagtctgtcgagcaagtaaatcgaccaccacacacgcttcctctcttcttcaaaaacagaggagttctggcggagccgatgcaacccagtagcgaatcccaaattgacacagcaagatagcgttgtatatgaatcagagtgcaatccacttccttgctcatatatagctagcagtaatcctgactgcatagtggctaaatgatcttgtcgatatgtatgtaggagcgagaaaatctttttgcataccacatataggggtatgatttcagtaagctgagacagttctgggacatttggcggattcaccagcaaaatatggagaataagggaagccaactcggcacagggctcatctcgcagtgatgcaactctttgtgccaagaagatgggatgaataaagggaagccattggtgcatgcatcgttcgtagcaacctataacattttctaatcgaagattcaggcttgccaagatgtcaaacatgtaggaagtgaaaccaatgtcgatgctcttcttcctgcaggtgccgatgtagggttgatcaaggtagtaaagtgatttgtgaataattaagctccaatggtcatgatcttgagtgcaagtgataggttgtagaggctgatggctaggattttcctgagtagcacaagatgtgtactgacatggaacgttattgcttcgccaatttagccaattgctccgaacaaggttgaatccattatttacctgacacaacggctgcagcccggaatttgccgatcacatttgcgtttctgagaatgacacaagaaacaggcgtttggagcagcactgcctacttgcataatagcaaaaatactcttgaatgggcgggagcttaaggagcgtggattcatgaaaacgccagtaagtagtggataatagtttggcctattagggacaagtacaatataaagcggtgagagcaatactggcagaaccagactcttgttgcgctagtccgctagtgtcggactagcttcccttggcaaatgaagtatgtgatgggctatattgtatgaatccttcaatattatacaattccctaggtcccttaggctgcttatcaatttcaatcataaatctcagtgtggtactcggtgttcggtgttcggtcttattaaaagacaatagatcgtcagctataagtatgctcgctactccgtatacgcccattagttctttgccaaacctcatcatcggatttcccaaactttgcctacccccaagaaacatgagtgtttccgacgtgccttgtgctccatcccttttcatatcccacggtacagggccgtttccgctcttggaccccgaacaggaatcctacagacaactcctccgccgtcacggaagcaagctcgacggtgtcaagggaatcctccttttttcggctcattgggagaccgagactccgcatatatcgggtggcgataatcctggtatcttctacgattatgaagatatgcgggataggctcccgccggcggcgtttgaattccaatatccggcacctggaaatgcgaagttggctacagaagttgccaaccgactgaaagaatgtggatttagtcctactttggatcttcagcgtggatttgaccatgctgtctacgtcccaatgatccttctacgaccgcaggccgatatcccaatcgtccagatgtccattctgaaaggacacgatgaacaagattcaacagagaagaacatcaagctgggacaggcagtggagtgtttccggaatgccggctacgccattgttgggagcggcgggtcgtaccatgacttcgaggctatcgcaaaggcattctttacaaatgagcctgtgccagcaggcacggaacgattcgaaaattttttgaagaatgcggcatccattcctgattcttcccagagagaagtggcgcttcttggatggagggaactccctgctagtcatactgctcatttgaccaactgttcagagcatctaatgcctttcatggttgcggcgggaagtggaggggacattgccggagtgagatttgatatgtatgagtacaagggagctccaatgagtttttataggtggtaaaggaggtcactcagtctgaaggtcgaccttcagacgaagtgtcattcttgtgtaatcacttcttgttacctataggaattatgaatttcgccttttcattaataatctctgtattttgtttccatacacgctgatcgatttttgatctggctagttgcgaagcattgcatgatagctcattcactcccttgggcactttccattatcagcgccctactgtgtggattgaatacatggaggtactacctggatacgacggctaaagacagagacattgcagatagctacatgtatttcttatgacaaacacttctatcctttctcacctccttcccgaattccatccatgaacctattcctctattgattgctcttcccacgaagtacaggcttatactcattttcaatgaaaataaagtgcgcaaggcccgaacttcgatttggatgataacggaaatgccacatggatattcccctccttcggtcagtgaccctcccgcagctgcccctcaccgagctaaactacggcagcgtggcacttacttgccgaggaacactagattagccacgttcatgattgacatgaagagccaaatcaagacggctagaatcattgtgtaccacgagttggtcatcttgacaccttcgggttcgagctcggctccctctccaattacctggtccgcatcgctctcgtcatccctgcccgccatgcgccagcgcgctttgccgggataggccgtcatgtatttatcgcggcaggtaaagtagatcagcggcgcggtaacaaatggaagtatgatactcagcgctacttgcgacccattgagtgctgcattaagcccttcgcgacccacggctcccgcgatgacgatgctcggtgtgatactgatggtgcgggttatgaggcggcgtagccacggcttcatcttccagttcagcgcgccctcgctgaccatctggccggcgatggtgcagacgattcctgctgatactcccgacagcaacaatgccagagcgaatatgatacctgccgcgggcgaaatggacttggaaagcagatcgtgaataccaaagatgtcggcctcgagggcaagtgggttttgatatagcgcggcaccagcaacgatgagaatggcggagttgacaaagagggcgaacgtgaagagcgaaatggccagctcgagaatcgatactgtcagcgagtgcttaattgcgcctaaggacgggacatagtagccgttgtcgataccatcatctagaacggtatatcccgacgcgagctgacgaggcaaaagcctacttcgctcatcgtattcgcgtaggcggggttgaacaattcccgaccctaggtacagactgtgaggcatgactgttgcgccaagaattccacaggcctgatagatactggaaaagcatgagagtgagataaggggacagcggggaattttggactcacgcttccgactcgatgagatattttgacggaatataacccttgaaaacctcccccggggtagcgccatggatcatagacatttggatgcaaaaacacacgaccacggcgagaaccaagcaaatgataaacatttcaaagtaccgtagacccttcatagacccttccgggtggtagaaaaacagggttaccatgacatcgaggatggaaatagcgcatcctgcgaccagcggtaccttagggatcagaaggttcaatgcaatggcaaatccaatcacctggtcagttagcacttgtagacgcacaatatacaaaacggggagtgaatcaggggtctacctctgctatatcggtggcaataatggcagcctcggcaaaggcgtacaggatgtagttgagccagcgcgggagaaacgcgcgacatgcctcggcgaggttcagaccactgacggtgccgagcttgattgccaggctctggaggaaaatagcaaacaagttggacaggagaacgatgaacaatagacggaagcggtacgaggctcctgcggcaatgtcggtcgagtaattgcccggatcaactaggtgcaggcatgtaagtgaggtgaaggggaaggttgcgggacgacagcattctggacatactgtacgcaaccgaaatcataaagcccggcccgatgaaggagccaaaggtagcgagcatcttccgggcgcgctggatcagcgtgcccgggtcggcgtcaccaccagctgaagctggaggagaacccgaggggtgggcggctgcaggtgtctgcagaccaccctcagtggactggccgcgatcaattgatcgctgagccagccggtaggtggccttgccgtggccgtcgctttcggtaggagcatcactggctatttgacctgggacattcgaggccgcatttgacactgcgttagtgtcgctttctcgaacggcccgaatgttgacgaggccgttgaagtcctcgttggtggtcaggtcactggagtttgggttcgggctttggttgtagccgtcaccctcgaggggctcctcggtgtgggatgtcttgttcattccgttgacaactgccgcagaatatgacttgttggtctacgattgataatacttgagacggggtgtcggatgaatgttggggagacgcggaaataaaatttatggctccagcggtactccgtataggcagcagaaaaaggaacccgaatgaagttttccccccacagcggctggtttgtaccgactttccccggagggtggattgatctccgattttgtttctcttctattctttctgagccctatttttagaggcacctagctcaatacagtcaatggagacagacagcaccagaagatagccgggattacttcggtgtcagactccatgcccgacatttcgtgcccaattgggattataccctcgcgcaaccccaaatacattccgtatctcatattccccatttgtgctttcatagtgggtgaatccggctagacaaccaaggatgacatggaagaagccggtgatgacaccgtaaacagccccagctgcggcagcaacactgtaagggcagacatcgtagcctgcaggttcaagttaagtattagttaaatcattcaaccgatccaacaggagcagcgaagagagcgaccccgaagctttcatgatgtaggagagacggcaacgaacctccgttatgtgccatacgagcaaagacgtatcctcccaaggcattgaaccccataacacaaagttgtgtctgaggtttgccaccatatagccccccagccgctgaaggacaggaaaagattagcaacggagctgcaagcgaggagaaaagacttacattgatatatccccatacattctcccgagaggggaatagcagcgacaacagccgcaataagcaatgcgcttggtgctatatatcgttagtacaatgactagatgggtcatgataatgaccgccaacgtgagccgcacagagctctagctgaacagtgcttcagtggacgggtttccactcactttctccaagaaccaaattgctaatctccgccgtgaccaggacacaagttccaaagccacttgccaccagagccaacagtatccacgcgggcgttggcaagcccgcgtaccctgcgaattcgataaatgctaacacccctgatttagtgactccagcgagcgcaccgagttgtagtgctctcgctgtcagtgggctcccattgacatgcgcggcggtcgccactgcagctggaccggcggcagcgtttactgcaatgtctagcacagccaaggcgaagaacgtccatactagagtaagggacatggtaagtattgagtggaggcatgatgaagtcacatgtaggaagtcattctgatttcctctgggtccaaaacatgacacttactgttaatagcaggatgattgagctcgtccatatccatggtgagaattgtcagaaaaaaccagattcatatactgaaatagaagcagtaacgattcacacaagtcaagatatatgcctggagaacagaatgagagtggatgtcttataagaaaatccaacttcttagccaagacctgatagataggcaagctcccccattcctcgctgccaaaagcctcgcggggtcatgtgaatgatgttataagaggctgaaaagttttaggtcccgtctctcaccgaaacaggtatatcacgaagcattaaacgaagggctgcagtaatttgatgatacaattccagattgaccaatcaagaggctcatttgccgaaactaagtccctggcgttcccaatgagtcctagcggttcctgcagtaagccgtgcgggcaccccatggggcatccgaaggcgacccaatcccagtgcgactaagaacatcttggtgggctcagccgctgccttcccgtattcaatcccttgaagaatgatgatttgggctggtcatcgcaggagttcgtggcgcagggctactgcttagccacctacgtgtccgggcaaatgcttttttcctttttctcactctttcgtcatgcacagcgagagagactcgaagaacgtgaaagcgataatgtatgcttgaaccgagactaagatatagagcgtctcccccctccgctcagatcgtttcgcttgaataatcattgcaacgatctttgtgtgccacccaggatgagttcaacagcatgtatcatccaggctaaccccgatgtatctggggccggagtaagtcatttctcatgccgtcattctcctccatttagctcctaccgtgagcaaaagaacacccagctaaaccatcacctgcagatccgtatatcgatttacaccctctgcctaggcgggtcgatcgttagctatctactccgcgtatttgccccaggcgaagaccaagaagagttctcgcgaggcgtgtgctccgccctcggcttgcaaggcctagccctcctctgcacagcgatttaccagacagtgcggggcgacctaacactcttccacgcgatatgtgtcgtgcaccttctcgccatacttggcatggatttggtgagcaaaggccggtatgaaggtctcggtccatggcggctatatttcttctccgccatccagattttggttttggcggctttcctcgctttgaatgtctatgtttgggtgacggcgccgcaatttggcagccagcccctgtgcaacaaggacacggtttatgtggtctttggagttagcatcaaagctacgtctcccgtattccggtatatcattctcggaacattgggtgcggttgtagctggctatgctcttgttttcacttgtatcttaccgtgtctgtgtgggtacgctgcgtaccgaagacggcatcccgacgctggaaacaggattgagggccagaagagaggctggatgaattggtttatggaggttaatcatcctatttaccaggatcatcccgagccacccgagaggctgcatggccaggcgctgctcaactttacgctgaacaaggtcgcgtattgttcgttctgcatatacttgattgtgtcgctggagcagactatccatcggaataacctcgaccccgaagagaaaggatggacgtttggacaggttattgcgattttcttgttgttaggtgtcgccaatgagctgctcaatgttcttattgcgagttgggataggaggcaggctgaaggtgctcagcagctggtgcaatttaggccgggtactgggaactcggtgcattcctcatcttcttgatatgttcatgtccgttacaccgccgtgcaacaagacgctcataatattgctgatatctgaaagatcatgaagccacgttttggatcatacgagtgtttcttagcaattgccgtgagctccgatctcgcctgtaactttaaattgccatggtcagtatacaagaggtgaatatttgtgtcaccacatactcctaaggtggaagcctgctgctcaatgatgccaacggaaggttgttaaggctagaattcgaatgtgctgaggtcgaagtgaccccggccccgggcagttattcttaaaagggaaggcgcgctgtgatgcagagccaattcgttgtatgacatcgactaatttgtgcaggacacgatatatattctatttacaaacccgagggtgtcaatccaaagatgaaagatcccaaccaagaagcgtccacctggcggctcactaaatgttaaacatctaaccagtttgcgctcatttcatagtactgtcaactagctcgcggtatatcttcttgagatcggcaatatcagcgttaagttcgtcaacctgctcgctcttctcacccagcatctcaagagtggtctggtagcgctgatcaaggtcttcaagttcagcttcgagctcctccacgcgggaatacgagagctgcttctcttcgagctcacgcataaggtccacaacctgttgccgggcctcgtcgcgctgggtcgtcacgcgggccagctcgtccttggagccggcgcgctcgctctctaggcggcggaccgtggcactcatgcgctcgaccagctgcacagaagggcccgcgccgacagttgactcggaaattatgtcgttgataccgcgggatggaggtgcatgggtgccgccgtacgccgaaggagtgacaggagtgccagattcaaaatactcctccggctcaaaggtgatggagggcgctgccatgaatgacggattggtgttgatgtgtgggggagagagcgtggcttgggtgattgaagcagggtaggagttttggcgaggcggcgtaccaatttccggtgaggtgaaagccatagtagatgagcgccggctaggagggcggaagtccgatggccctggggtcatggcggcgtcgagagtgctcgaacgccgtaaagatgcaacaggtgatactccgcgtagttgcgacggggaattcacttgctctctccacttggcccgctcctcctcgagcttctgcgcccaagttgagtcgcatgttttcttctgctcggccatgtccttttgcgttgaggcgagggcctctgtcgctttctcgagtttgtgttgcagcttctgcagctcttccatgcgttcctcgagcttgctgctcaaatcgtgctcggcttctttggcgttatctagttcctcttcgaacttctttaatttctggttctacggtgatgtcggttagtcccgtgttacaccaatgcatggaactttgtcttaccatctctcgaatcttcttgcgaaggtcagcctcacgtcgcccagcatcatcgcgttctttctctacgctagccagacgtgatagcaaagatccttctagtgtatgccaatttccacttgcagcagcatattgtgtttgcaaggtctcgatctgacggagaagtttggcttgggtctctccagttgcccccgatgaagcttcctctgcgcgggagcgaagagtttccatcttactttccaagacagactgttcgcctttcaattcagcctcgagcattcgggccctctctttctcttgctccaccttctccttcaactcagtaatttccctcttggatttctcttcagtgatgtcgcgctcgatcttcaaattgcatagctcctcgtctagttctgtcgcccgctgcctctccagctctagagcgtcagaattcgcttttgtctcggcggtttcggcacgggaaacggcccgactcaattgcgatttcatctcttgcacagtctggctgagcgcattgcgttcattggtaacagcttctaagtccttagtcgacttggtctgagatgacaaagactcggttgccctcttctctgcggcctctgcccgcttggctcttgcttcggagttgactaagtctcgctcaagcttgtccgtctttctcttcatttcaatctgagatttggtgttttcagtaagttgctggcgcaatttcttgattaccgttcggtggtccatttccgacttagacagcttctgcccttcctctagaagcaatgcgatcttctcatctttctctaggagttgtttttgcgcactccccggggtagcatttgctgctgcatttttagccgattccgcagcatccttagcgaggtatttcaatttcgactgtaatgcatcaatacgttcaatataaccatgcatttcttcctgccattgggactcggcagtcttatgttcagccttcagacgagcgatatccgggttttcattctcctctggtacctcgggcgattcaacgctaacccgcggactatcacccaaaccaatatcactcaataccgaattgcgttgcaaatccgaaatttcttgactggctttggccgagtcggttgaggattgagccacctctacagagatcctgggcgcggagtctgcgacgctgatgtctgttgaaacacgcggtgatattccggagtcgtagcttatcctcggtgaggctaatttatctgcaatgctgtcgtcatttggtcgcgagatctcggagtcttccaccgcactattcaccgatgcaacgctggaatcaatgtccatacttgaccgaggttcattgctaggtactgggctagcaggcggtgatgagactcggctttgaggagaatgggaagagagattcgaggcattctgtttcaccatagctcgggctagacgttcctgaagccggtcatttcttcgcgcggtcgatgaactgcgggataccgctgaaagatgttagccagctcgactgaatcgcacatttactgaggatttcatacaagaagcaggagcctttgtcagtggtgcatctccgccctgaatttcagtgggctttgcagtagagttggtctggtttccctcctcatccatcaagatgagatccagccgagactcgacgccggctactgcctgctggaaaaaagaacccactccccattttggcttttgtgcctgcgagttctgtgccattgtggcagaattactgtactggatatcgcgaacaggctgctaagcggcaaatgcctcgtgtcgcattcgcatggattcggtgggggctgcgctcggacgtcgacttgcgattatcgtggggaacgttgcaaaatttcagaatcaaggcgacaatgattttgctagaagtattgaagcctaggcggcaatggcaaggacttgccgcgagggcgaatgagggagactggcaggattaagccggattcgaagtactaggcgggaatgcaaacaaagattaagacgctggtccgataagacagtaagaacaaggcaaattatcggcagaagagtctatagaaacaagaaagacgatagagaaataagacgcgagaaaaaaaatagagaacagaagacaagttgaggctatgcattgagataccgtaggtcttggcgcgggcttccgtcatccccaagctcccccgtctctctggacacacctcgagtttgtaccattcacagccagcgacgctcatttttctggctcaaaaaccccccagattacacccacaatgtcactggagccacccacctacctcagctccctccagaataacatccgagctcggccaattccgtgggagggtgccgtccgggcgggcaacatcaccgatgaccacttgaagaagatcaaggcggtggataaggtgcgcaaggagcaacgccgtcagacgatagaaggagatcttgctggatacacagatctgttggccggcggtgcacacggaaagagtgtcttggactcggcctcgagaaggaccgatattgtgcagtatatactggtgctggcctcggacttgattcaaggtataacctactagcggagctgaagttctgaggaatcatactgactcatattaaaaaagatgtgcctgctttggccaactcgcttgtttctcaccccgaaccgtacaagcccttcctaccattcttgcagcactcggcaaacgccgaagaccccattcctctgctcacgtccaccttcctcacggcgctcgtgtcgcacagtctcgttgcctcatctaaacctgcaccccgcgacaatgaggctcttccacagctctacacctatctctctaccttgaccaagaatcaggatagtggactccaggatattggtgtccaaggattctctgagctgctaagaacaagccgagcccgagaaatcttttgggcgcaacgtcaagagaccttgacccccttgatcgacactcttcgagctgcggcgggtgctaaagacaacgtcagtaacgcaagcacactgggaagcagcactcgcagcgtcgagcctggtctcgccggtggtattggccttcagcttctatatcgggtgctccttgttctatggcagcttgcgtttgaaggcgctctcgttggtgatgaacttcaagagtgagtgatgtgaagacaagagatcgaatatacactctgagctactaaccccacacaggaactatgaaattatccaactgtacatccaccttctgcgtctctcaccgaaagaaaagaccactcggttgcttgttgcaactctgtacagtctttgctccagcaaccggacaactctgctacccatcgccgtgttccttcgactgcccgccctcctgactaacttgtctggtcgtcatctgaccgatcccgacctgctcgaagatctcaacgcactctcttccatgctggaggagtacaccaagacacagaccacctttgacgaatatgccgccgaagttcagactggccacctccgctggtcgccccctcacaagaacccgaccttctggaaagataacgctcgacgaattgttgaggagtcgaacggcgctttgcccaagaaactggccgagatcctatctaagagttgggataacgacaagcaggtactggctattgcttgcagcgacgtaggtaacttagtgaaggaggttcccgaacgccgtgggcagttggagcgactaggcctaaagacgcgggtgatggaactgatggttgatcaagatgaatcagtacggtgggagagcttgcacgctgtcggcgaatggcttcgatatacctttgagggctgatccatcaaagaggactttcccgatatgttgatgggcttaccaggatggacatatactctggttggcatgtactgtgtattttcttgccatggcgcatactcgcttctttttttccgggggagaatattagaatcatacttatctatgaaattcatggcccctatattctgatacatattccagtactctaaacggtggatattgcggtcggccgctaaagaaccccagacctgcaaacacgctgcgacaagacaagagcaggaccctcgatctctctctataggatctaatatcatgacttcaacccctatcgctgttccctagagattatagattacattcgccacgcgggcggcttatcggagagctttccattcccccgcaggaattcttcgccgagaacatcatccaaccgttcaaaatccacagcacccatgtcgagatccttcacaggttgcaagagatgtaaggcacgccgacaaaaatgtgacgagctgagaccgaactgcgggcgctgccagactgcaggcgagcaatgccaatatgcaatgcagttgcagtggggtggacgggcattctcgcgatcccggtttggtgcttgcgtcgggacaggaggcatgcagagactcggtatgtctttataacagagggaccttgtacatagttctgactatcccagaatattcaccaggagagttcatctacaccaccaagacggcggtgcagtcagccagcgccaaaaccggatcagatctcaccctatcgcaacccgtcgatcccttctcgtccttgtcgtccagtcaaaaggccttgttgcatcattttatcaacgatgcctcccaaatcaccgcatgccattcgggaatgcagcaggacataactcgcatgctgatcccaatggctcttcagacaccttctttactctacgctaccaccgccttatcggcgatccatattcaagccctacacaaccagtcggagaccgtaaagtcagcaccggatattgcccgcttaatggctctcagtcttgaacatttccgaacagaactgcagaatccctcatccaaggatcccgaggcgttggtggccacggctcggacgctctgtctagctgagatccattctggggcgatcaacccgaactcatggagagcacatgttgacggggcgagggcattgatgagggcatctgacgccgctggcgaagattccctgcggtctacaagcggtttccggcgatatttggatcgttggtactggtcgatcgtgtcgcttacggcactgacgggcaatggtccacccattggcgatatctctgactttgtctcatctgacttgatggggttgggtgggtccactgattatttagatgactattggggtttcagtgtagaccttgcggctgtctttaggcaaatcggcgctgccgcttggcgaagccatcaagtcgagaaggctacccagggctttgttgcaggagaggttgatgacagtgttgagaatgatgccgcgtccttggagttcgcaattcgacaactcatgaatcgtgactctagctcgcagccctctttttaccctagagccgctgaaggcttatctgcagagaccgcgcagcagctcctgctatgcaatgaggcattccaacatagtgcgcttattcagatccatcgaagacttcggaaaacaccaactacatcgccagaagtgcagcagtcggtccgacgtatcctagagtgcaccgcgcagattgggccatcatcaggtctctcgccttgggtgatgctaacgacaccaatctttattgcgggctgcgaggcgcgcggtcaagatcgagatacagtcaggcaattactgtcgtcgttgcatgacactatccgcgtcccgaacgttctccagtcactaagattcctcgagcagtattggtctaaccaactcagcgaggaagaagactggagccatttcctcggtaaggttttctcttagccgtttctttgttcatgctaacatccgatagaacgaatgcagttcgatttcatcccttactaaggagatcaggccagagcctgttatgcctcacgtgcaatgattcatgtttttgagcttgggtactatcttctttcgttacactataacttttcgtgtgagcaaatcggtgttggcaggggttttggcgagcgcatgtacctattaagccatggagtttggaagtggcaatattgtttttaagcaattgtacatgaaatgtctttgttctttcgaagctaacactttttattgggctcgcctatatttaaatatctgagtattagttcgaccaaggaattgaccacatggatattgaagtaaaaggcgccaagcctaggagatatatagacggaactaagcagctaatctccgcattcggacataacaaccaaatgacgcgatgagtcaaaaatgataacattggaagctggtttgcatcatcgaatctcaaagcttcatgatcccgagtctagataggtcagatatagcatattctaaccttatacgggtcggagtcgggtcaactcatatacgaaaccccgggatggcgtctacgagccattatgattcgcgtagactcgaacctacactccatggatcgtataaccttagcattataagattacctatcaatagatgcgttcgaattctttgaaatcaagtattctgattcctaatacacaaactttagtcattcaaattcaaattcgaaaacgtagtggtgcttgggaagtatatagtctgttataactacctctcaataggagcttgatttgacagtatctcatctcgttcggtcccacgaacctaagggtgtctttctcgtccttatccaatggaatctgtcattcgagaggccccattcgggcagcttgttcgtctcttgacgaacaataaatactttcaataccccgaagaaaagcccgacttcaagcttcccgacacatggcttcagttgttgaactctagggatgaaggtaaacaaaagaacgccatccggcatgactccaaccgaagccatgaacacagtgagcccctaagccggtcctctacccaggcatccatgcaattcaccgaagctcgcctcgaggccgacgaagaacatgaaatcgagaaagtcgaatccatccccatcgcccccaagagaacaaaagacggttctatcctcgttgattggtattataccgatgattcggagaatccacacaactggtccaacctcaagcgcgctctcatcactatagtgatctgtctatatacctttgtcgtgtataccacttctgcgatttacacgtcctcaacagaaggtgtcatgaatgagtttggtgtgagcacattggttgctactttgggtctgtcactctatgttctagggtatggtaccgggccattgatcttctctccactgagtgaaatccccgtgattggacgtaatccagtctacatcgtcacgatgttccttttcgtgataatctccatcccaacagcttttgtgggcaacttcgccggcctgatggtgctgcgatttctgcaaggtttctttggctcgccctgtctcgcatctggaggtgcttctatcggagatatgtatagcctaatgtccctgccttatgccatgatggcttgggtttctgcggcatactgtggacgtaagtttccttcccgtttatatatcgttatatacaccaaataacgttacctatactaacactatacagccgctctcggccctcttctcagcggctttgccgtcccagccaaaggctggcgttggtccctcttcgaatcaatctgggcctccgccccggttttcatcctgatgtttattttcctcccggagaccagcagcgcaacaatactactccgacgcgctggccgtctacgcaaaatccacaataatagccgcttcatgtcgcagtccgaactcaaccagcgcaatatgcatatctcagacattgccatcgacgctctgatcaagcccctggaaataaccatcaaagatcccgccgtcctcttcgtccagatctacacagccatcatctatggcatctactactctttcttcgaggtcttccccctcgtgtatccagccgactacaacatgaacctcggccagatcggtctagtcttcctatgtatcatggtctcatgcattatcggtattgccgcctacgcgagctacatccacttctggatgcaccgtcgcatccgccgctccggcttccccgtaaatgaggctcttcttatccccgcgctgcctgcctcttttggtcctctgattggccttttcttattcgcctggacggctcgtgcgtctattcactggattgtccccaccatcggtatcactatctatggtgccacggttttcgtcgtcatgcaatgcatcttcatgtatattcctctcacctaccccaggtacgcggctagtctattcgctgcgaatgatttcttccgcagtgcacttgcatgtggcagtgtgctgtttgcgcatccgctctttgggaatctgggcgttgctcgaggtgtcagtcttcttggtggactgagtgttatcggtattatcggtatttggttgctttacttctatggtagtaggcttcgtgctttgagcaaatttgcgatctcggatgaggttgaatgattaccttgtggtttaatcacgatttttgacgaaaagttattgcaggatatttgttgatagcgatatacggaaattgttggagaggatgagacaaagagcgacgttacattaacgatgaacgtgaatctcgattctcgtcatgaataatgagaatcttaatatttaatactgtgaggagctctttgtctcttgaataaatattgttaagcctcatagaaagatgagagaagttgatccggatcataatatcctcaagctcaccaattacgagataccctcatcgttatttctgtgcacgcctgtttgcaatgaatggcgctagctattctacctgaaaagtcagtgattaccaaagtttaatagtattgctttttctatgaataggttggcactagtaggaccaattgttggcacagaaatatattattaaaaacgcgtgactttgaatagattattccagaaagatcatttgaaaccataattggtgttaccaatcttcaacttgggtttacccacagagagaagtgatatcctcagggacgtaggtgctcatgatagaaataagcttcgagagagggacccagtcaagaagaccgtggatgcttcgtacgggatggccactatacaggacccgggcgtagaaagactttgaacccttcctatctttcgtctccctgtaaaactgttagagaattcccgtattagaaaacagtctgacttaccaaatttcgaaagcaatgttggatgccatagcaggccagcgaagcgcctcgattcccaaagaaccgaggataggaccaatatctccatcatgaataaaggtgtggctgtaatcaagggaagactttccgctcaggacagcctgcagacgagaaacgatctcgccaataaacaagccctcgacaagctggatgtacttgactacatccgggttcgtgcgccagtagtagttccactcccaatcaccggcacggaagacctcctgagccatctgcttcgtgacacaggttgagggatctgacagactgcagggcaactcatagccattgcaaagacggccctggaagttatccgaaaagtggtcaaaggtattctgccacgaactatctgtcgcgcccaacatagagccgagcttcgagcgcaactccgcggtaacattcatatgctccttccactgtgtggtagactgcagactagacagagtagagctgatagcagagcaggagtatccctcgttgacagtatcaacggatgaaaccatttggtgcaggggcagggctccctcgtagtgaggccacatgccacgcaggaccgcgccagccgaagcttgggtgagaacggactcgctggagcggaaccagactcggttgtttggcttggcagggatcaaaccaagcttcttgccgtagacagaccacaggtccttgccgtgctgatatccgtcctggactcctccgatggtgatctgagggtactgacaggtgccgttcacgccggctgagaaggggttggtggggtcctggtatgtctgcgcatacattggcatgggctggatgccgcttgcgctgttagggcctgcgtagagatacgggcgcacattgtcgcagtgatactcttggttctgggaaggggttagcttaggcttagagtcgatctgagagttgcttacctccccacctgggagaatgttgtacggagttcgtcgctggtgacgctgcagatactccaggtacaccagctttcccttagttgaccccttggttagagcttcgggcagttcatattccgctgaacgagggtgcggcatcgaacagtagtcatagatgccgtaggggctgcccccggtcggtccattggttggagcttcatagataccaccatatgtcccaattgagctgtcgctgatgtatgacgtatcattcagcgttgggggatagaaggtgtccaccggggtgtgacccagcacagaggctgccacagaaagcaagacgaagctgcgcatgatggagatgggcttgagtgaggagaaccaagactggcgaaggccttcaaatatatagatttccgaagccatcaccaccaggcccaaactgataaacaagatgaagccccaccgcattggaaccagtggagattggaaaatcggcgcacgtgggatcggcaggccaacctgagaggtgctagcaaccacgtggctcggcatatagtatataaccaactttcggctaaacgattgttctcaacgtcgtgtcgtccgatcgagatgcaatttcccgatgtttccgatttcgggtctcggcattacccctgcataatcctgccgatatcagatgcttagcaaaaactatataacactatatattccagtccctttgatcaggatatttgattatcggtcgactcatctctcacttttacaatgatgtggaaggcttcccttgttatggccatggccatcccgctggcgtccgccgccctggcggattacgcactgcatacagtccttgacaatgctgctccgatctttggatcgtacaaaaaggtcacagggggaaagtcggaatggatgaagaaatatcacgacaacactttgctcgttcatatgaacatccccggcacccacgacagcgccacgggaagttacaaccaggcgacgcaagatgcccttcggggcattacagatctcaaccaggtcgttgttccggtgccagaggcattgacgtgccaggatgtgaatttcatcaacatgctcgacatgggaatccgggcatttgatctgcgatatgctttcgatccaacaaacaccactctcatcttctatcatgcacaggccctgctgtcggagaaagctagtgtcaatgatgtgctctttggcttttacaagtggctggatgatcacccctcggagaccattttcctgtcattccagtaccagggctcgacagctctgtacgccgaaaacaacgcggctgtgcagttggagctcttcaataccctcaccagccccgcagcgcgccattatttcaagcaaacgaaggatgaattgggtaccttgggcgacgcacgtggcaaaattactctcatgcgccgtttcgacctggaccagcttccggataactacacagccgcacttcccggcctgcacttctcgcccaatctctggaatgataacggcgccgccatcgacctggtgtacaactcggacaagaacttgaccgcctacatcgaggactactaccagccgctcacgcccactgggtccagtgcggttgagaacatcaggtggaagtacaacgccacgacggaaaacatccacaaagccactacccagcacccgaacagtctcttctggacatgggcgtctagtaacaatatcgtcaacaaccctcccgattggcctcggatcatggcacttggaaacggcacccactatacaccagctggtggagttaaccagcagctagtgcctttcctgaagaagcagaaaggcaagcgtgtgggaatcgtgatgtttgatttctttgagcagccctccaacctggttgatacgcttttggatttgtgaaatacaagatgagcgagatgttgttaggagaatagtcaatgaccaagcttaaccttgggatcaatagattgaacaatgtggagccgaatagattacttaaactttcctcgtctatctgtgctataaactccacaattaaaactggatattccaagacccatcgctcgcatcacgcacgtggacacgcccccatcaggtttccctacccgcacgacccttcccaaggaacaatcaaattgcaatgccaatcaaatccgatacaatgcccttgtcctccgctgacgtcaagctctcaactaggcttgcccagcttggtatattgatactgcgcccagtgaggaaccccatcttccaagtttcccacttagtcgtatccaaagagcacatgaggctagcacaacgggcgaattcatgtttctccagaatgtcctcctggtcaaggcagatgcatctccacgcatcatccaccttatacacataatcccagatatcataacattggctgtatttgattttttgcaactcaagccagccagatcgcaccaaactccaatcagaaggtttgcagtgcttctccagcttctcccacatctgctgtgggtttcgaatgttgcgaacaatcagcctggtcgtggcagataggtttgtattaatgatttcccgcgccgcctcatgcaggctgtctaattggggttccaagtgatgtgcttgagaaagttggccgattttgccctcaaccaaatccaaaagaaaattgcggctcagaatatgcctcattttgcggctccaggcgcggtagtcggagcggccgcgcaaagggggacaatcgcattctattgggaaattatcatcaccgaatgcatttcttaagctgaaggtacgttcgatcaaggtctctgcttcggtaatctgtcggtcgctggggctttcgggtgcgacagtcatctcagtggaaatctgctcggcggaattgacccggcgtctttttgcgggcgaggttgaaggttcatctcccggaggtccttgtccagagagggatcgtttcgtcaatggtgttgaggaggccatgctgtttattcttgacgcgcagacctagcttggtggataggaattctcaacacagcaggtcaggacagggcaatgataatcgataaggaatgctgtgaattttcataggataagtattgaaatattgaggtatgacataggtaactatcaccacgtcgagcaaggagaccaccgtttatatgtacctagcccgacgccagaaatattcacttccagaaaactgtttgctcaaatatgcagccctacattctttggaaaatccagaaacttgacattttagacataattcccccttttcaacttctctggatagcacctaccgcatgtgctatcgagtctctcgtggcaaggtaacagctcgagtaactccgttgtattatagggcacaaagaggatcgatttcgtagatgtaccaaaagctccaaagaccgtgcttgttctttcttccctgtactcacatacattccgcacaacttctcagaactctaaacctctctcactgaatacctacctcggcttgaaaggccagaatgccagcaactgcaacgtctacaaatgcaaaaggaggagcaaaaatagtactcgccgcgctaccagccccgcttgatgctgaggtagctgtagatgtactctaagctgatataccgcttgaactagtggaagtaatgccggtggaccctataggagataggagagttacaggtaaaattcgatgtcatgaggcagaggtcacggttggtgtagttggtggtagaatttgacccatcatgttgctcgtcatcgtgatgttattgaggaagcgcatgagtgcgttcctgtcatggcaagagcgatggaacaagagagatgaagagtgtaaaaatggaaagagcgttcgatgaaaagcaggcgaaaatttttgaagctagcatatgatctacatcatgatggccataatcgctcatgtgtcatttggtagaaaaagtatatctcattgagtttcagaaacaagggctatgtaatgcttgacccagggcatgatcttatctgacttggcacatcagtgaggtgggccgatcacaataaagcggagagaaaaggcaccaaaatcgggcaatattgtggggtggatgacaaatgctgccggagtagcctcggctcgtcatgacgtcatcgagagagggccgtagctccaacgaagataaaataccgccagtctgcttgttggaagtccacgccgcaatcaaagtcgtctgattgattgggtcaccttataataaatattaacgtataatagaccagcaaaagaaaatgcccccccctcgcaaagctctcattgcaatcacctccgctcatgctcctctgtacccggagggcaaagagactggtaagcctctacttcgaaagacagctcaagatcagaaataacggcaacttgacttaggcttgtttatcactgaagctttgcaccctttccttgtcttcaagaaggcaggattcgatgtcgatctagtgtcggagaccggatcttaccaacccgactggctctcgcagcagaaggactggcttaacgatgaagacaaagctatctgggaggatcactccagtgaattccgctctaagcttgatgatctcttgaaaccgagtgatatcaattccagcaacgtaagtctcctttacggatacttggaacccgagctgagcattactaaatcagtatggcctatttttcgcttcggctggtcatgcctctttgatcgactacccagaagccaaggggctacagagcattgtatctaagatgaacaccgacggtgctatcatctctgctgtgtatgggtaactgcacctccgagctaaacatatttctaattctgattaggtgccatggcggtgcaattttcccaggaatcattgatcccagtacaggaaagtcgattatcgctaaccgaagagtgactggcttcactactcagggagaggaggaagaaggtgttctagacaccatcaaaagctggaaccggcccaccattgaggcctccgctgcaagctcgggagccacatgtgagttcgatgtccaaacgtcgattttttgtatgtctgacacgacattagatgtctctcctcctggcccttgggacgctttcactatcaccgatgggcgcctcgtgactggtgccaatcccgcaagtgcgcatgtgacggctgaagctgcggtgaatgcgtttgatgctatctaaagcctagatcacttgggaaacgcaggatgccctctgttacccaggtagtaatagcaaatatagtatcatccattctcattacagatcccagctatatcgtaggtgtatattaacttcacggtagctttgagcgttcaaaagcctcatcggttttggaagtggacaccaactcgcgcgaagaacctggatatgtgtgaaccacaaaagtgagatagttatgtagttcacccccaacaaatcgcttagtggttcacatgtcttcgcgagttggtgtccttttcgttcttggtcttcgaaaagatatggtgattatgaacagcaatctggtcagccgtgatgaattaaaactagatgcaaatgtatcactgaagatgtatggaggaggatgatagaggaaagggaaaggtgggtcttgttgtggggctgctttaggggtagtactaagccttcttaaggttgtataaactacgtaaaaagaagatatccataaaaggtacatttaagaagaccattgaaatgactactgaagccatgttatgccttcagttattcctatatatatcgaaaaaatgatttctacattcgaccaatatgattttaaatgatatgatacgaaagggctcaagctagatcaagacagacatagcatgaacgaagtgcaaccaccgggacctactctctgtcctggtatttttggcagcaatgagaaaaatattgattggcaaatctggaagacaactaaggcttgatctgctcactaaaatttggaataaatgctctgacatcatacaagtttggaagtttggaagcttgatagtgaaatgcgggaagctggacacactgaggtatagcatttccgttgtagttttgagttttgcgagctacctaatcctctccataaaatatcaaggaagttcaattccttctttctctgctgtctgtaagatgtattgcttgacctggataaacacaacataaattagccattctaatccaagtggatacttatttatggcgaggtgcttaccttatcatctgggactagctgaatcgccagtcgaccttcattgtctctttttgccgcctctgctcctgacttcaacaaaaagatcgcagcgggcccatgtccttcagagatagcgtgatgaagtgccgttaatccgtcaccatccgttgcattgacaggactcttaccctcttccaagaggagcttcaagataggcacagaccctactgcggctgctctgtggaggggcagttggccacgtttatccttgactctggcgctgcatttattggcaagcaaggtgcggacggtggaaagattggccttggaactggcgaaatgcagcgcattctactagatggtaagttcatgtacatccagtagccaaattcgggtctcagaaagctgacctgtccagtgtgacttttgatagaaacatcggctccttttcgcagtaataggtcgatcgttgcgtcgcctgcggcatctttcaggctagctgcaatcatcagaggcgtccagccggatccatcctatgctgatttagcaagtttatatgacgatggctagtcaattttgaaaaggcttgggcattcttttcgaagacagaatagcgatactcacttctacgtctgggtcgaagtccttcatagcgactagcaattccacgaccgggtgtcggttgtaggccacagcccagtggattggaagacgctcatcgtcatctttcacgtatgcggattttgggtttgcctgtttcgatgattagccttgttctgggagatcgaacagtaccagctcgagcttgatgttgcggggcagcctcggccctaggtggagcacaactcacattgagcaacgactcgacaacctcatctaaagaaatcagattagtgcttatttaatacaaagaagggtcaaactctcacttcttccttctcgggcagcctcgtgcagagggaatttctgatcggaatccatgacgactttggaggaagaagagtaatattacgataagagctccgataagccgggcggctgagtcagtaatattgagcctcgtgatctcccgaagagggtaaaatttggccaaaatgaatgtaggtatcaatttactgctctaaaaagattgagtagagaatatattcagttggagggcgcatttgactcatgtagccgtcgttatatatttggtaaatcaggctagaacgggaactagcagttacaagattcgctacaaagtaggtaaaccccacaacccacaacccaacaggctattattattgttataacttgttataaatggtcttatgaaagctcattaatgaagatattcatatgtctttcaataattaagaactgattatctgaataagaacacccggttcaccgccctctaacctcaccgcccgttttagccggatataattgttggccaattatggcgcctcaggcacgaacatccgttgcaacttcgatccaaagattcatgcacgtccttgtaccatcttcaaccatatcttgtctcgcagctactagagacgcagcgtcggtattctaattcaatcaactgcacttttagaacaagtgccgagactgaccctccggactcgattgcagtcacgaactagccacaggcttttttcatcgcgcgcaccatcgaagtgtgattctttggagctctcatccttcaaagcagaccgatttatctcacccccccccacatcagttctttgcacacacaaaatggactacagcgcaccccattccgccgatgatgccgtgcgcatgtccgcgaagcggaccgccgaactcttcggtgccgaatacctgatggtcacaccttcaaccctcacagacggctcaattggcgtttcctaccgacggaaggcggagtatgaagatattaccgagctaccacgatctctcgccgagaaacaggcgaaagcttcagccggtcggacaaaacggccgaggattcaggcgcagacacccgcagacggtagtggctcatccatgtcacttgtgaggcggccatcgggcacgggagtaggagctgaggaccagcctaagagtttggttcagagaccgtcagccaccaagcaacagcggcccgagtggcacgcgccttggaagctgatgcgcgttatttccggacatttgggatgggtgcgggctttggcagtggaaccaaacaatcagtggtttgctagtggagcaggagatcgcacaatcaagatttggagtttggcgacgggcgcattgcgactcactctcactggccacatctccaccgttcgtggcttagcagtgtcaccccggcacccgtaccttttttcatgcggtgaggataagatggtcaagtgttgggatctggagacaaacaaggtcattcgacactaccacggtcacctcagcggtgtatacacacttgcccttcaccctcgtctggatctgttagtcacaggaggtcgtgatggcgtgtgccgagtctgggatatgcggacgcgcagcaacgtacacgttctcagtggacacaaaggcactgtcgccgatatcaagtgccaagacgccgaccctcagattatctccggctcgctggactccacagtccggttatgggatttggccgctggcaagagcatgggcgttctgacacaccacaaaaagggtgttcgcaacatcgccatccacccctccgaatttacatttgccagtgccagtaccggcagtatcaagcagtggatgtgccccaggggcgatttcatgcaaaacttcgaaggtcagaactctgtcatcaactctctgtctgtcaacgacgagaatgttctcttctctggtggtgacgatggttccatgtccttctgggattggaagactggtcaccgcttccagtctacggaaaccactgcacagcccggctctcttgaagccgaagccggtatcatggcttctaccttcgatcgtactggcttgcgtcttatcacgggcgaagcggataagaccatcaaggtctggaagcaggacgaagacgctacgccggagactcaccctctgacctgggcccccactctcggtcgacagcggtactagagggatgaccagcatcactggcattcgtaccctccgttccgatttctcaataccctgtatttattttccttttttgccatcaagtttttatcggcaccatgcggagttaagcgcggtctggaagatctttgatcttaaaatattcaaacatgtaaccatcgggacaaatttcctcggaacggtttgtttcatgctctgaaagaaagagtcatagagttttgtatgatacaaaccccaattgagccaaacgatacccttgacaatcgaccctgctagacaacacgtacaagtagcctctacggtctagagtacagaagacacagctggactgaacgggtatcatatgcaaactatattacactaactctggataatgcgtatcgtatcaaaaatccccaaagacaagcctgaccatcaccgctcaatacccaaaccaaagcccttagcctccgcatcctccctgaaagcggacctgacatcttccgctgcaactctgagccgaactttactactccggtcgccgcgagtggggatcgtagtacccccgagcacgcttttagagccagagccttgctccagtgccaggacacccgagttcatgagcaacatagctgcatagcccaggctccgcacgcgagcagtggggcctccgcccagtaggaaatctttcacgccggcgcctgcggctccagcaatggcgacggctgcatcggcgatgcggcgggcttcgtcaaggacgtcgccaaatgtagattccgaaatgccagttcggtggacgcgggctagtagggcagcgaggaagagcttccctgacagcgggaggcagcgcaatgattgttggagtggagttgatgtagcttcgtgaatagcttgcttgatagtggcgatagtgacgcgccccggctgaccctttgcaggaggtttagcgatggttgattctccggctgctttgactgcgacagccttgttacgccggccgggggttttgctgggcgtaggaggcaatgattctgtctcgtctttggcctcatccgcggcagccgcctcatcggctgcttgctcggcgatttcaacggcccgacggcagatgtctaaggctcgtcgagcatcgccactgacagcggctactttgcgacttgcgaattgaacggcgtctgggtcaacgatattgcccggtacactggccaggcgggtactgatgatttccattagatctgtgtgacggtatcccgggaatgtgatacgggttaaaccgagacgactggatattttgttgcttagggttctttcagggagatccatggtgtttgcaacagccaggacaatgaggcgcgaatggcggagagcaggccagttgaagaagttatacatgacagactgattctttgtgacaagctgatccaattcgtccatgagcacaacgcaggagactcgacgaggggagggatttgagaattctctttcgagaagatccaatgcgtgggaaggtgatactcggtcgcccttcaaggcttcccatagtaaggagtaggattgatgcgggtccgtgactttcatgccgttaatctcgacaaagatgaaatcgtccatctcttctgcatgcacggcaccgtttagctgcgcaaccacctcacgcactgtggcagtcttgccagtgcccggagtaccagagatatagatacaagcgcctgtgccttccatgatcgcagcgctaagatggttgtatacagtgttgaactcggtcttccggcacggtaatgagtctggaacagtggagacgtgtagtaaattccgagcctgacggtaaggagagtcaaaatgcgtgggtgagaggacacgggtacccagaggagtaaactcaagtggtttttttacgacaatcctgatacatgttagtcttattttatgacacacattcaatctcgctgtttcctaccgtttatgggttggggtcatcagggccttctttcgctgtgattgtggcgtggcattcgttgctgctagtcgttgtttctttctcggggtcgcaggcaccgtgatctctttggtatcgacatactgtaatggtccaaatcagcgctggtttgcagttggaaccgtgtggtttaactcacttcatcgtccgcagccttgcgtttcctggaagccttcaagccatccctgacccagctgatcagatcttggatgttgttttcgttgtacatctcctcccagacaaactcctcggtgtaccgtccttgaacctggttcacgcctcgtcgacagacaatgcacttgttatattccgccaattcagtcttgttctttggaggtccattcgggtatttggcattgaagatactctgagacatgactgcccccttcccgctgattgatgtcaaggggttgctgttgaaatcgagtgtgatgtactgttcgttgggcaaggcatcggtcctgcgcttgttcctcgtgcccataaattcgtcgggggatgcgaaccacataatattggcggatttgacaacctcgtcttcttgatcttcatcctcctcctccaaaaattccgtaataatgccaacccagtcctttccagcttcaggggatttcaaaagaatcacatcaccgactttgcattggaattgacccatgtgtgcgccaatgattttgcgtttttggcgcgctggacgggatcgtcttcggctgcgtttcgccggggtatcatggttggcctcggtctcttgggtagtttcctcagttgtgtcgtaaatccactcccatggaaggtcctcgacgcctagttcatcatcagagtcgtctcgaaccagagctcccttggtcatccattgggcgcgttcacgggcactgcgcctttgaggcgaagagtctgaatcgctatcgctcatttggggtgtgggagatatgacgggcagaatgcaacaacagagaaggagaaatcgcgcttgacgcgttgtccactttcgtcccttttaggtttagtctgacaaggaggtctagccaatcaaatccatatattgctaccttatagtaaaacatggagtagagtaaagtgcaggtatagactatacatagtatgtgaatatacaatatttcttcaactaatcgcatacacgtggattgaaatcatctttaacttgcttcaaagacatcactcagtatattgtcaaactactttttgaagtttatctactaacgccttggacatttctggaacattttgtagagccaggcttaatctccagttatgtctggcataccagaagttccctggttgatttgaaatgtcaaattaatacatcattgaaaaagtgaggttgatcacacttgccagatgcttcaagattgcggaacggatatacgagatcggagatgtcggagaaacataactccggaaccctaacaaaatccaacgacatctcagaggatcagatctatatacttcctaatgaatttgcttttacttgacttcttactactataagtgacttttataacacgaataccaacatgcaatgcacagtatgtctcttttacccttcacagccaaacaggtcggcgggaacattgatttccgagtgtcttgatctatcaatatcttcttattgtacagaaagtcaaatagtggacaagctgagatgttctctaaggtaattcatatgacctggatagtcctggggtctctagctactacgccgacgcatatgtaatcaataaccgcggccctgtggctccacctaggcaggaatccatccatggatgaatgaatgctcttactctttgataactcccacccgggcagcctctctctttccccttctggtcgcattggttaattcatatttcattcccttcctttatctttcttttacctcccacacgagtagcattccttaagttgcattccgtcgccccccagcagtcgccctggcagtcgatctttgttcagttccgttgcactttcatcgcacttccatcgaaaagtagcgaactactaatcccccctttctttcacttctgccgtttgacatttccaagataaccgcgtcaccttcttccaacttagctcattccaacaatccgtcctgtgagagatcgctacggtcatcgcacagctgtcgctatcagaccccgttgaaatggcttctctacccgagccccatgataaggagtaagtttatcttacacatggataattgcaaggatattcgctaactaattccaccagctgggagcgtaccaatgccaaatgtgagagataatttggttctcaatcatggttacacgtactgacttagatagcatgggaactaccctattatggccctggtccagatttcggccgggggaccatctacgatggggatgccgaccagaacacggataataaaagtaccgatgaggatgatgaggatgctttcgaggacattaactacgaccgccctcccgttgactatcagctgcaccctacaagttcaaaggttgctgtaactggtcgggctatctcaagtgtacctcctgtacctacgccatcgccggtcccaagtcaaagcacctttcaaacccgaccagttcctactgggtccagaacaggtcgacctcagtcaccaatggggccagtgttcaatgagcgtgggcctaataccggaatttccaatacattagcacggccgcattattcggcatgtaatctcaaaccaggtcaacgtacccctgtcaacaggggacagactgacacaccgcgaccaccgttttattccaaaaaaggcagcactacttctactccttcgcaacacaaagctaggtgtccagctatttcatcggggcaaaatgactctcattccaaggcaaagtggcgcaaggggttctctccagatggtaagtatgctcacatcaacctcaagtccaccattaacgatcaaatagcgtcttatcgtttgccatatgagtgccaagtgtttcaagagaagtgagtacatacagctttgcagtagctggtcttaaaactaacccagacattgaaggattagacaagtcactttaggagaaatttccaacgtcgacttccgtcagcggattatcgaggagacagatgcatatatgaggatgagcgcgggaaacgccaaggtccgtttttgctaaaaccctccaatatctagagactcattatactaataatcatgaagcttgttcacatctggggacggcaaaagcaggtgttggaggcccagaatttgcttcaggatatggtgaatcggttgatgcagcagcggacttcgcctacagtagcgcgctggaccaaggttcacgcgcattcaaataggaaggttgcccatgcccggtcacaagaaagccatgaggaaagattgtccgacatgcggaagcccccgagaatcaccacggattacacggtatgtataacgctcagcccgccctactttgcttccgtactctatggatactgaccgacacttgatactacagctcgctttcctctggccctcggatggcccctcactcaaccacttgatcactgcccggcgcgagctcctcgattccattcgattgagatatgacgtgaatatctacatcaagcctggtatcccagactaccttttcatgtctggaaataatgagcgggatatgtccatcattgcatcccgattccgagagctatgggagagggtaatggtccagcatgagacggaaatcaagctgttccttgttgcggcgccccgggcagagcttatgagaactcacgtcatcctgcaaaagtccggtcggctctcggtgcctgttatctgtggaccggagctggccccagatgtaaccgcaacctggaagaccactgcggatgaaatcaagctcaataacaagaacattgtcaccacccgccttaggaaagcactgcatgtgattcctcaatttcggggattcctgcaaatgcgagcaaagttcggttcgttcgccctgcaacagtggcgcaagccgaatgatggcacttcttatgagttctcagagtttcgtgagatgcttacccatatgaacaccgaaggacgtttgctcccagggtatgtgatatgtgatctccgccataatctgatgatttactgactgactgatcttttagaatccggctgcagcaagatgagatctttgaccggatcatggaatcaacctttctaaagccctggggtaaagccaaaatcaaatccctgctgagcctgatgcccaaatattccgccaactttgagtaccaagtgaacaaggattcggtaattcgcgtggaggcaaaattctctcttcctcttggctcgcaggagtttgaagtcaacggagtccgttgtttcaaatccaaacagatcggtgctcctgttgatcgtcagatgcccatgcagatcagcatgattgactttgaaaggtttgtctacccaatatcctttcggaattttactggaagctaagtttatatataggtccgattggcagcttgaagtgaaggctcttgaactctgccccgaaaaggagatatcccccgagctagacaaattcatgcgttctattgctttccaatggaacccgagtgcaaagagcattggatctgtcccccagcgcaaggcgaggttctcatatggtgcgccagtcaagcgtttcgtcgagaaggccacaatccaactccaagtcaaagactcgccgcatgtcttcgagctcgcccgcttcgacgagtacacgtacggggttggtcactggtcgatgacccccaaagtgtcctggggtgcatcgctgttcaatcctagttgggatgatatactaggtgagcaggctgatgtcaaggctctcgatatctccaaagaggggtgtctgtcggtgttctttcccccgccgggagatgagcaggaacagacagaaaagccgaaaacggacgatgagctccgcaaggaggccgagaaccgaaagatggatgaggagaagcagctgggctctttcatgagcactgtccagcaggttgcgcggatgctaggaaatcctggcgctgagatgccagacttccttgagaacgatcttggaagtctgttctagtcgatgtgtgcaaatcgtcccaaatttgtcgcatctcatgcgaccacaagggccaactcagaataataaaaaaaaaagaaagaaagaattaaaacgagacaaaagacaaaaacaacacccatatcataaccgtccggcttgctaatcaagccgagatcattaggtatgtagcaataacagtgccaattcagagttattcctgttcccaatatcggagaactcctttagccctagattcgtggtggattttctcgttcttataattcctctccagtttgcttgatccaaaatggtgagacagagacctgtatattatttggatttttctatggtaagccatgtttggcctgttcgtaccacacaggtcgaatttaaccctgaggagcaccctctgagagcaacttctgcctcaatgctgtaggaaagaggttagcaagcgaaaagaaatggtctcgcaaagcaatgcgaatcccggctcctattatccaggtaagggtcgactaactctcttccgtaatgcgcagttgcgagctcttggtctgtacaatcttctccagctcctgcaagtttgcctccagtcccttgaccttctcaccataaaatgcgaccgccttaggcgcagtctggaagaagaaatcatcagcccaatgaacccgatcaccgatatagccctgccgccacataccttctcaacataaaatccagttccgacatcaacaagcaccttctcgcgatccgtcaaccggcccttgacgtacagggagctggtgaggggcacgaggatctcatcacggccatcggttcccatcttctcattcccaatcacgccgtcgttgatcgtgcgcacacagtcgcggaacttggcctgggcggcgcgcagcttcgtgtgcgaggtggtcaggtgttccaattcggaggtgaggcgggtttggagtgcgcggagctgagggatggagagggtggcgaggttgactagtttctggtagttagcatgtatttatcgccatatgacacagatagccggaagcccgcgctgtgtcattctggtgatggggggaccggtgacgcactgccttggggagctccttctgatggggcgttttgtgacattttgggattcggaaagaagaatagggtatggtattaggggggatcgatttccgtgattgttgtgttattgtagatcagatcctcgcattgggaccgtataggtggtggggggagcttcaaaaaactcctgggtcttgttgcgtggtgatagtggggttaagtgttggcaggcggaatagtggacggttgtgtttatacccacgcacttgacatacagcaaagatttgcttattacctcatattgtatgagcgttacaatttgttaaaagaaagctgtcagtatattatccatatattaatatatattaatccattcattcatagctacaagtactctgtaggtaaaatgctatctgcggggaaaaaaagatcactccgaagttctccgctccgctccgtaatccttcttcaccacatatcaatggcgtcgagactggcagcatgtgaagcttgcagaaaggcgaaggtcgcctgtgatcataagcgaccagcatgtactcggtgtgcaagcaacgacagagccgggatctgcatttaccggacgaccccgttcaagagaagaagagcggagagctctacacctctgcagtctcctaggtaggtaatgcatattcatatttgctttactttcacatgcttatcaagtctgcagtcggctaccaccggcccaaccatccttcaccccaaggaataatccctatccaaacccgggctttctggggtcctctagccatgtcgctattttcaacgaaatttccccgcaagactatcatgcatctgatacctaccaagcctccgaggatctcacgatgctgatgcagttgcagtccactggcgagaatatcttgttaatccaaggcgcggatgtcctcagacagctgttcaacacatttccgctagccgccatgaaagattttgttactttttggctggcaacgggagcgaatctagctctggcagagccttttaccgagaagtgtactgaaaatatgacgcgcctgtttacgtccttctcacaggaagataactggcatttggcatatgcccagcgtctgacacaaaactcccgggaacctttgcagtttgacagcacatccgatatggaaagtttctccgcccagtttctcgaccagaaattccgatgggaaagtctaggcatcttcctctctgccgtgagccgagcagcaatcgctataccatttttcccgccattgttcaaaaccgaaaaggataatttcgtgcttcggaagctctctacaagacttagtgatcttgcgttagatattgttctctcgttggattgcttaaacgacctacaactggttctacagtatgagaactttattgtacacacccatgttgatggggatcaaagtaagaactcctcgttgattttgtctgtagaaacccgcagctcacagagaatccaggctatcactcttggagtagacttggaggtgttctgtcgtccatgtttgcccttggctaccatgagaatatcgaaaaaaccaagccaccaattccgacattcctttcggaattacgaaaagcagcttgggccaccacgtactcagccgacaagaatgtggctattttccttggtcggccacctcggatgagcaagcggttctgtcacttccaattgcctttggccccgacaagctcggatcaggttttcaatgcctcacccgttgaggacgaggtcgtcagatggaaaatagatacaccgatctgctacagggcaggtattcggtgggcgaccctttgctccggactgaaagaagatgtcctcgaattgcttcgattaaagcagcgcgagaatttcaatcggaaagctaggtaagttagcgccctccaatgtgggaaccactttctcatcctagtgtttgatatagcgtcattcggcaaaaggctgaaactcaatgggcaaatctaccttctcaattccgactttcgggccctttgaaagaatgttctggggatgcgttcgaacgtgaccttatagctagcatacgcctggaccagctacatgttctctttctacttcaattgtcgtgcctggataccctgactgagcccgatccgtgtatactcgacatctcggatcaaatactctctcttgtagtggacacaatccttctacgagatcaactggtcaactctggaattggactcatttggaaggtatgtctatctactatcaggacttgaaccgttacttactggactgaacacctattagatcgctcacttcggacttccagctacagggatcatcctcctgtcaatgctgaaagaacaccgtacattaacagaaggaagatcctcgtggtctaaaacaatactcaatctcggtatctttgttgcgcaggttcaggtagggagcatcgttcggcgtggagatccgaactacgctttgatatccaaagcgacacagacgattgagcggttccttgattctatacaacgtgaagggatacaatccccgacacagctgtcaccgcagccaggagagaatggtgattgggctgcgtttttcagtcaggatctgtgtgatttcgagactgacttttgggagaacctcgcgtatcatccttctttattgccttcagaccctattttgcctccaatataggattaatacagtaatataaatgcagaatacatggcgaaacctttcatcagttacttaggcatggagttgaaatcactaaaatctcatttaaagaacattatggattattttatcaagtaggataccaaagatatataacgataccaaactctgccattatctatacatcaaatcaccttcggtcctctactatgatttgtgtgctatatcgagacacgccggctgttgttgaatcgtcataagggagatcactcacctatctccaaaccatgctcctcatcttggtcatctggagtgggttcacgggccttaagaaggaaataatctcgcatcgaagaccacacgctactgtctggttcaacagacttattcttgatcttgtaaggcgtaaaactttcacccatccatgcatcaccatcggcgtccagaatttcttcgtcatttgaagacgaatcacttagagtagtgaaggtactccattcaactttctcctttggcaaccgcgaggccttcgatcttttcttttgtggcggagaagtttctccgtccttttcgtcatcgctagtccgcttgcgtttgccttgttcaatagtacttgtggaaatgccgaattcagtgcggggcggagatggagcttctgtagtatcagcagtatagaagtcatctgggataggggaatgaatatcttccggtgcaacaaggagacgggagtctggaggagggtcaatgctaggttgaatgaaaggggcagtagggggataaggggaatgatacccaccggaagcccaaaatgtatccttcgtagcagccttgggaacaggactaacaggaaatactggggcagggacaggattcggagaagcaacaggaaatatagtacgattacgagtgcgaaccggggtaaaagtatgaccagaagtaggaacgggggcaagaacaggaacaggaacaggagcaggagaggggacaagagcacgtgcacgagcacgagcacgagtaagacgagcaggagtaggagcaggggcatgggcaggtgtaggggcagggagaagggaaaatccagggccagggcgaggggcaagaccacccgcaggagcagggagagagaaaacttcaaaaataggataattaggatcagtgactctccatgtgggatcagtgaagcggtaaaatcgaagcacatcgaatatacgctcggtaagctccgctgagtctgggacatgagcaagaactacagctggcaactcatgttgcctagcagtaatcctgcgtctgacctcaaatccacagtgacctctgaatgttccgttccaaggtcttccttgttgaagagcattgtacagaatgggattatagatctctttaatcaggtgttgggtggccagtcgatcttgagtattcgtagccatatcgatgccgagtgctgcccaaataggaccctcatggcttgggctcatatttattcttaactctgcggttactcgagccatactggaagatgctgatgagaagtgggtttaatcgaagtcagtattggactgttgggttggattgcaagactgttggcctgtagtggtttagaattcttggaaataatgagacttgagatggaatatatcaactattaagtaccaaaaagctcctttgtaggctattagattgttgtgaatatggtctatgtattttggaagacataaagagacatattcttctcaaagaacactcttttagaacaaagggatgtgtcaataaaataatcggcaattctaaacaaggcctttatgaggtagttaagaatacaagttattgtttctcttcctgtagaaacaaaggaagggaaaaggagaaagtgcccaagaataactacccctgttagaaacaaaaggaaacccacaaaggaaattaggaatgaagctcgaatctgtcttctaagatattgatctataaatggatctctatagaattaaagtaatggcttttgatgaaacggccacctgcgtggttgaaataactgtaggtgatgcttactgaatacctgagttcatcttgtgaagaagctccctaatcgccatcttgccgctacgctgggctatttcaatggccagctcccttttatagttcaacgtaagttataaactacagatcaacagagttaaaagatctcacggggtcgtcagcctctgcttcgagagttgagatctagaaagacatcagcttgacagagccaaacagtatcctctatggtgccgactgctgtgcaacatgtgtttccctggaaacagtctgtagcttcatcattagttcaggtttacgcggctgcagggggtgcctaggtagtgctcggagtgagtctgtgcttattcctcgcctacttaaggcaaacaatgccgctagaccgccacacttgtgttccaatgatgattatggactgaatatgcttttgtaggaacttattcagacaattcatccctaggcgccgattcaaaggatgagcagctatctctgtggtggcttgaaagcaccttttgtctaccttgggtgattcttcgtatctgaaatcagtttcaccggtagtttcgttgggagcgagttggacctttccgttgcctaatacttattctggtcaaggactgtactagtcctttagcatgttggcgcaaactgtatttttcaatctcactccggaacgaactcatgtgcatgaagcaagggatggctccactagactttctgacagggctcacaaaatatcgtaaaaaccaatgttgatataggagatattggtagggtaatgtaagaagacagcgccgaggatcttctaagcccgtcgtggggctgtgtagagggggtttatgcggaacgaagaaggcaaaggcggtcgaacttggtttcaagaaagggaatagacctctgctgtacacagacactttacccctcgttgactaatattcacccacgtgataatcacatggtccatgcggcagtgtcacgtggtaaaaatcaccaatctcggccatgagcttatgtttctaggctaaacgggaccccggacccataattctatattatgtaatattctgaggtacttccataaattctaattctaatatggcgtgtactccctggctctcaataatggcttccgcctaatgaggcatcctctctccgagacattccggatgtctcgtctcttaccgtggttctactattactgattttacagcgcgtctcaagacggtgagcagggcaactgaccccgagggcacgtacccggcggactccaccttggtgtcaaacttctgttagtacggggtacgtgggattcgccagcctccacctatgttgtatattttttagctcataatttaaggtagtattcaattcggtattttacagagtcaaaataatttaatgtttaaatactaccactctaactctcaattttttttttacctaactaacgagggctcccgagcatgacgaacggcctagaatctggctggcatactgtacctaacatgagaaatccagggttatacaatagaggagaggagttagagaaactcaaagcaatacaaaatacacgttcaatactacggactaagattgattagggatatattaggccgatctttgcgccactgaaccctactagggtacgccctgttagggtacgtccattgttgtatacataactacatgtacatatgtaggtgcccacctagttagacgggatacttttcttgataagatatttgtaatagtctggacacggagtagtccgatacatgcagtaaatgtcataagttacaactcgatatctcaacaatggcggtctatatgaacgattcctattagtatcaaatgagtgccacggtccgagaactccgatgacctgcatcctgaatcctgaatcctgaatcctgatgtgaccctgcgcgctatgcccatttatagcttggccgaaatcaccaaccttctttccccgcatagaacttcgacgtggtcgattgaacgacgatggatgattattgccagacttgggctggtttgaaattcggacaactgttttgtactctttacagcctcaatttacggtcttttgctcgatgtcagtggcgccaaaatttaacatcatggcgtcctgtccgtgacttgggcccgggtgctatgatcccgtttgcgtcttagtgctgacgggtggtccaatgtggctattcctcaaacaaagaacaaagccacatgtttcatttgggggctgatctgcagtttcgctcaccccacggggaaaagtttgatctcttttatattctgtggggtagccgaccttccctctacacttttcaaaatccaagatcttctgaatctgaaagctaccaaaaagctccccatcatggatgaaaagtcgtctaagagcgatttccctcactttgagcatgtgctcccagctaagacagagctggatgaggctatcaaccctgatgcacctccgaggcgccaggcgatcggtatcaacatcgttgagaatccgttgacggtaagtcacaactgagagcctctttcatgttcgtgtcggacatgaacactgatcatctttgggtatacagcgcgtctctaaggagcaggctattatcgatgcccggaattatgccgagtcgcataatatgagcgaatatgccgatctgtttgggcgggctgctgtggttgcgcggagccccaaagagttcccatcggctactgagatcgatgaagaggagcgcactgctcttgcatacgagagggaccataaatggcacggctcattcatgctctggtactcaattagtctatgtgctatcggtgctgccacacaaggatgggatcagactggatccaacggagccaacttgtccttccctgaggaattcggaattgccggtaaaggaaaagatgaatggatcgtgggaattgtcaactccatcatcttcttgaccgcaggccttatgtaagttaaagccctgtgatgatcatttttcttctatcttttgcgactgaccttgtacatagtggtgcttggattgttgatccacttaaccactatttgggccggagaggtgagatttttgtcactgctctctgtctcactgccacgcccattggttctggcttcgcaaagtcatggcaaggactcttcgctgcgcgatttgtgatgggaatcggaattggcgcaaagaacgctacagtgcccatttattcagctgagatggctccagccagaattcgaggtgctcttgtcatgttctggcaactttgggtcgtagccggtgagtatctctaatccctcgtcaaggaacatggctaatccctaatgcaggtattttcttgggcttcgctgccaacgttattgtcaaggatgtgaaagatatcgcctggcgtcttcagctcggctccgcattcattccatccttcatccttgccattggcatcttcttctgtcccgagtctcctcgctggcttatgaagcataacaggcacgctgaagcattccagtccatgaagcgcttgcgagctcatccaattattgctgctcgagacttctattattcatacgtgatctacgaggaggaactcaaggagactcggggcgcaggctatttctcacgtctgtgggactgtttcgccgtcccgaggatcagacgggctaactacggtgcctcgactgttatgattgcgcagcaaatgtgcggtatcaatagtaagttgtatctcgtcgcgtgagatggcctagtggtaacacgttttagtcatttctttctacagctcgaccatcttccgggatgtcggctacacagaagaccaggccttgtatgcgtctcttggctacggtgctatccaagttgtggcaactattcccactttgttcctgatcgacaccaaaggccgaagaaccttgactttgatcgtaagccgttccgagatctcttgcggaatatcactaactattgttcttacgaagacattccccctgatgtgcatcttccttttagctggtggtctctctcttctgaacaagacggataatcatggggctatgattgcaccagttgccttgtaagtttggtaattgttttatctgagtacaggctctgattcatatctccgactaggtttgtgtatttgtttactattgcctattccttgggcgaagggccagtcgctttccaatattcagctgaggtattcccgaccattcagcgagaacaaggaatggcgtgggctgtttgtatcaacaacacttttggtaagtatccctacatcaaacctatcgaacattccattgacaaactattctatagctggcatccttagtctaacattccctcggatgatgactgtgatgactcaaactggcgcttgtaagttaatagtcctagaccatgctgttcaaataactgacccttgctctagtcggcttctatgctggtcttaacctcctagcttggtttatgattttctgctttgtcagggagaccaagcagctgactctagaagaattggatcgtacgttaactacggaatctacatgaccatgtactgacatatatcgcagaggtattctcggtgccaaccaagaagtttatccactatgaacttactgtgtggcttccttggtggatcaagcgatacatcttcagacagaatattgaacgaccgccaccaatcattgcactgggcgacggtgtcaggtaaaagctcatacagctctacatactgaagatcttcagactgtgaattttgggttggcaggtctttttttttatcactggtaacttggtctttcattatcctatctctatgaggtagaggagagtgatctacattttaactgaatagttcggtcgttacatacgcaaaatacatttctagtactatgcactgaagcagtgatatcatatacaaataaggaaccaaacttcgcgtgccttcctctcttgcgaaagcactggtatatcaggtcggtgtaggtaaacaaagtcttttggtaggaacgaatcagcccaacttcaaatttgtaaactccgaggtcaagtacaactcatctcaatgcatattcttcgactcgtatttcaatatcccttcattactatcatcatggaccaaacatctgcagaacgtcaaactttcatcgaagccccggatcaagacacagtgaacccagaagcctcaaccgcgaacatacagtctacactggcagatgatcgatttcagtcaacatccaacacctcactaatcccacatcttgaggatgtccatcataacgtctcaaaatcactaagggtcaatgaagatttgatgagttggtcagatgcctggttcccaggggacgagcgactgtgccccttgtggatggggccttggattgaatttcctcaacttcaagaagagatgtggaacgaaattttcaacacgcccgaacttgtcgatgcccgtattttccctccgcaagtcgccgtccgccacgctgctcacatcctagaatggtacatagtgtattcagaggagaccttgaagatatttgcaaacaggtcagtggacgatttcctcgccacgacttttaattttatggaacaagaggacacattgcgatacaggttcagtgtccggggacaattgcgcttcgaccgcccgcgtcattgctgcacctctgttgcgaatttcggattcgaagagccagcatatgcagtcctgtatattccttcatattgtctgactttgcccgaactggttgcagggttgcacgggacatcaccgatggagaccttcgagaagaaaccaactacattcgaggaacatgccacttacgtagtgtctcgtgcgatcgttcggatctattcacggatgatctgctctggacgccggtatgggtatatctacacaggagaggccttggtattccttcaaattcccccggacgacagtagcaatatcaaatactatctatgtgttcccagtcgagacgtcgtttatcatggttatgattcccagtcagaatgggttcgccgtactactttgggccaaatcttcgctttcgcacttcagtctttggctgccagcccaccaacgcaggaatggcaagacgcagtttaccaaacctatcgtgcgcttgataaagatgactcaattctcctgcctcaaaccccggatgccattcgatttagcccgccagcagagtttctatatgagacctcgttctgggttaaattctgggggaatcttctgcttgcagacatacaaataggcgaatatgaaacctctcgttcacagagttctgagttatcagacgtttgcaagccttattgtacccaggcatgcctccttggtacctttcaaaaggatgttctggatcagaactgtccgaatgctgctgcccatggcacagaaagacatcagattacctcacaggagatatgcgacatgatgaatgaacaactccgcgcgaatcggtatagaggattccaacagctgcacatcgttggtcgaacctgttatctgttaaaagcaacgttgctgtctcatggatacacgatgttgatcaaggccaccagctccaagcggtcacacaggatcaatactgagttgaaaaactatcagaatttgcttccattgcagggaagtaagattcctgtatgtcttgggatgttttcgccgaagatcccatattggtatcatggtactaaaatgacctccatgctgctcatcagttggtctggaattcgagcggaccaacataccactcttgaaacgtgtgagtaccttgaacaggagatgcaaaagcttgaagacaaacttaaggaacatggagttgttcagaaagatgcagcttttcgcaatgttttgtggaatcccacatcacaatcttttgtgatggttgacttggaagatttgaagtggctggggagcgagggaagcgaatccaacggaggctcaattcagtccagtgactaccttggagatgtcggcaagtaacctttgattttggcgctcacaaagatattgtgagtaacagttggttgagttggaagaaaaggcaccgcaaaaattctatatttattcccaacgctatctttatgatgcatgccgtcttccttactgtttgtaaagtcccttggacctgtataatatggttgcaataaacccaaaacaaattgatcactccagatcaaaagtctagtcgacatatattagcattggatgataatgagcccacaccacgaataaacataccatatcaaaccaaacaccacctgcaaagttagactgacttttcccctggttcttaaacccaacactctcatagaaattcaccaaatagtcatgcgcaataaggacaaccttgttcgccccgaaagatcctctcccaagatgctcaaggtatgcccggacgagagctcttccaaccctcttgccttgatactccggcgaaatagccacagagtgaattgcaatgttgtcaccatacttgtgattcccaattagttcatcattgacaaagaccggttcaccatccagtgatcgccaattctccggcattgacatcgatccgtcggtgatacgtgaataaggagatcgcactgcaatgacatgtccaatgagtgtaggtgaagctgggtcttgctcattctcaacaaagagtcccaggcatagctccgggcatgctcccaagcgatagcagaacttgtttcgtgttagaggaagcaatcttcggaattgcttatttgcctcagatctggctctggcttaccttttcctcggagcatcgctccggctctataaaggctttctcgacggctacgcagatcttcacgtcttccttgttcagagtccgggtgaaagcattggctcctccgaggctcgggatgtgaatgttggtttggttcatgttgggaggcttggattgactgatgagaacatgcgaacaggttataaattcgaattgaaaacaacaaagatagaaacaattgtttaatgagtcaagggtatttctatatcggtgggtggagtaaaccggagtattcgggccggagtgttcggcgtggatcacctagtggaggacctcaaatgtgaaatccggagaaaaagtggacattggatcttattgatgcattgattagagatgatctgacgctctattagctacaccgctactgtatatcgtggccaatagcaatcattccaggaatcatgttatcggctgtatatctaagctaaatctggggaagaaaaatgctgtcattttttagttgttgtttggcaaaagcctagtcttacatttataggataggagatgagataatgtacagattcacttgctaatattacatactggcgctttcagccattcacagtttggccaacaaggactgaacaaacgtgtggagtccatccaacggcacatcctccttcacgtcgagccgacggcactgcacctccaaagtctgtttcttcttccacccattgccaacaacaataataatagggtacccaatcaagtccgcatctccaagtttccagcccatgcccttgtcccggtcatcaaggatagcatccacaggcgctgcagtgttgccggtaagactatcatacacctgatcggcaacagtctccagccccttccccgagactaccacaacctcgtagggcgcaataacacgcggccaattgagtcccttagaatcggcaagtcggttcgccactgcggagatcatacgcgaaacaccgataccgtgacatcccatctgcataggcacgatctgttccttggcagaagccttcgcacctagatccatatccgaagattcctcgagaagagcggagttgacagacacagacgcgtttagtactttgctgtaccgcgttcccaagtggaatgtgtgtcctagttcaacggcagagtggctagtcagcgatccatccacgcactgcgagcaatggtctccgtcatgaacgcggacaaggctgagtttgtttgaagtctcggggaatcggtccagcttggagtaatctatgtccgaggctgtgcagccaacttcctggagcagatcactgagcggcgggcgctggtatacccgaacctgtgagtcataaagatccaacacacgcggcttatgcgtggaggacttgtttgcctttacgtgggcggtccatcgctctaatgggttctccacgctcaggtcgaggtcaataccagcggcggtcgctactgccttgacggcgtgtgagttgacatgccgctcgacgggctccgtcgcgccattttgcatcgagaatttggggtaccagctccgcacgagggtattgctatcgtgagagatagccatccacatgccagttgagattgttggtccaccttcgacaactgcatcatcggtctggaaaccaggtgtcatggtctcttcggactcctcagcgatgtgcgccttgccgtctgcgagttcttcgttgtaaacatggtcacagtgcgagcagctgaccacctcgtcctcgcccttcggactgatgaagtggtactcatggctcaatgagccgcccatatttcccgagtctgctgccgcgacgaggtaggggatcttgagttcgttaaataattctgtgtaggcatttttgactgcatcatatgttttcattgcttcggtcagactgtagtcgaatgtatagaggtctttcatgacgaactctcgcccacgaagcaggccctgtctgggccgggcctcatctctgtacttccgcgctttacgattctgtcagtgagcttcataaaaatggacaaaaaaagagtctcactgatttgatatacccgcagaggcaggctcttgtatgatgttgtcagattccccacaagtgtagtgatctcctcctcgtgtgttggggccaggagaaaaggagtgtctttccgatcattgaatcggaacagctatgatccatgttagtgacattatgcaatacagtgggtatgatcaacttacttctgagccatcggtcagtctgccagactgtgcccagagctcttgtgaggatattgaggacaatgagaccttggatgcgcctagttttgatttagttgccatcccatgatatagacagggtatattacataccgagcgagcgcatatgcttgtcaatcagacgctctagtttatcttgaacacgtagaccaagtgggagcatatgaaacaccccagagtatgcctggagaccgtcagtgatatttacttgtacataaagatgtgacttctcacctgtcgaaggaatccacctcggactagcaggtcattggcatcctctagatctctgttaacatctggtgatagtcaatccctatcgagtttccgaatggcgtaccattttcaccatcaacgggcttcttggaaattccaccagtaggaatccatatgtttgaaacgcggcttctaccgtcaacctacactgagtcagtactcactgtcaagcacattcaatcaatcttttggaaggacgtacgtgaagattgcattgctgaatgcgcaggctcaaggctagccgccgcccggctatgcgcccggatagaggtcgtagcccagaaatcatcgatcaaggcagcttaaggcgtcgaaattaattattttcgcaattgaaacgctggctgaacacaaaataaattgtagagcaagccgagtctcccttctccgatgtttcttatcgggttggtccgagcgccccgataacgccgcaaaagatttctccgtttaattttctttcctccatcagtcaaccctaaacacaatacaccatggctacagggaaaggaaagcgctcttcgagcgcaaatgagagtgctcccgcgacgagcatctcagctcccgctgccgaacctctgccattcatgccggacgagagtgccttcgcaggtctacgacagaaaatcgaacagcgtttgaagaatcagagtcagaccaccgggaaagggaagaaggacaataacaagccatcggcctcggccaccaatgctttcgcaaataaaggaaagcaatttcccgccaagcccggccgccctcaggattctgcgcaaggcaagaagcgagatcgcaacggcgaggtaattgctcgcgagcagaacaaggatggaatgaacaagcaggaaaagcccaaagctggcaagaagagcaacgatgacgagacattgcgccaagaaattctagctatgggtggtaccgaggaggatcttgatcttcttgccggtgttgagtccgagtctgaggttgagggcgagtctggcaaggttgacgacgatcttcggaaacagctctctagtatgttggaagcttcagggcacgtcgtgcctgaggatctagcggatgacgaagtcgaagaggagatagagagtgaggaggatatcgaggacagcgaagacaatgcagagagcagcgggccagaatctgatattgaggaagcccccgcctcgaagacaaaagagtctgaatctgtggtgccgaaggagtacctgaagctggtaagactgaaccggcctagcaccacaacccttttgctaacatgatcattatagaacgttcttcctcggtccgactggtacaatatccctatgccctcctccgccggcgacacgaaacatatgaacgccttgccccgccacctgatggagcgcgttcacgagctggccaacaaattgctgcaggaagaaaatgaggagtatgcggcggcccagagggcatctgcttcttcttcccacaagttctactcgaccattatgacgtctggtaccctgagtgataaaatttccgccttgactcttaacgttcaagagtcgcccctgcacaacaccaaggcactggagactttgattagtctcggaaagaagcgcagccgtgcgcaggcagttgaagttttgcggtcattaaaggatatgttcgcccagggtaccttgctgcccagcgaccgacgattgaagtctttcactaatcaacctgggctcgtcgccgcattccaaggtgccggtgggcggtggaacgagaaagaccctcttccgggtggtttgaaaaagagcgacctgattgtgtgggcttttgaaaacatcgtaaaagatcaattcttcgaagttattaagattctcgaaatttggtgcaatgacgagatcgaattctcacggacccgggccgtcagttatgtctacgaacttctcaaggagaagcccgagcaggagaccaatcttctgcgacttttggtcaataagcttggtgacccgggcaagaaaattgcgtctcgggcatcatacctgttactacaactgatgcagtcgcatcctatgatgaagccaatcatcatcaagtcagtggaagaagtgctattccggcccggtcagagctcccacgccaagtactatgctgttattactcttaaccagactattttgagactgaaggaagagaaagtggctgctcagctgctggacatttactttggactgttccttgtgcttttgaagccctcccaccagcctaccgatggaaaacctgcccacaagggtaagactgcccccaagggcaaatacaacaagcatggaaagggatcgaagggcaaaggcgacgacgatgctgccaaaggacaggcccaggacgacgaaatgcgggagaagctaatctccggtgtcttgaccggtgtcaaccgtgcttatcctttcactgactctgattccgaacggtatgttttctttacactctactcccctatgcaaggtactaacttctactagcatgtcgaagcacctcgacaccctgttccgtatcacacactcctcgaacttcaacaccagtatccaagctctcatgctgattcaacagctcacggtgtctaaccaagtctccggcgatcgcttctaccgcactctgtacgagtccttgctcgacccccgcgtttccacctcatcaaagcaatctctctacctcaacctcctatacaagtctctcaagaatgatttgaacgtccgccgagtcaaggcatttgtgaagcgtcttgtccaggttcttggcatgcaccaaccttctttcatctgcggtgtcttcttcatgatccgtgagctcgagaagaccttcaccggcctttcatccttggtcgatcagccggaggagaacgacgatgatgatgaagaggtcttccgtgacgtcctcgatgaggacgacgaacagccggaagccgctcctgttgttgaagccaagaagcagaacaacgtgtacgacccccgcaagcgagatcccgagcacagcaatgccgaccggagctgcctttgggaattgctgccttttacttcccacttccatccttccgtgtctcttaacgccacaaatctgcttgagcacaaccccatgagtggcaagccagatctgactctgcacactctcactcacttcctcgaccgcttcgtgtaccgcacgcccaaggccaacgccagctcccgcggtgcttctatcatgcagcccctgggtggtggtgaagccgccgaccggttggtggaggcgggcaagaagacacagaaccaagtgcctctcaacaccgaagccttctggaagaagaaggccaacgatgttgccgcggaggatgtcttcttccacgaatacttcacccgtgtcaataaggacaaggagaaggtgcgttccaagaagagcaaggacgttgatgacgaagacaactccgacgcaggccttagcggagacgaggacgagatctggaaagcgctcgtcgactcccgccccgagctggaagccgacgaggacagcgacgacgacctggacatgtccgatttggaatccgcgttggactccgaagaagatggcgaaggcgcagacgaggacgagtccgacggtggggttatcttcaacgacgagtccgatgttccctccgacgaggaaatggccgagttcagcgaacccgaggaagccgcgcccgccgtcaagaccaagaaggccgccaaaaagccctccaaggaggtcgaggaggactccgacgacttcgatatggacgtatcagacgacgatgcctttatcgacagcgacgaagatctgccctcggatatggaattgggtggagtcggtctggaagagcccgaaaagcccgatgccgcgcccgagtcgaaccgcagcaagcgccgcaagctcaagcagcttcctactttcgcctccgcggacgactacgctgcgctgttggaggacgaggacgacggaatgtaatctgtttcactttgtacaaagagttcgattattccttaccccccgtggggccaaaattcttttttttgcatctggagttgttacaggttgcacacattctgccttactatccctttcattgttatctatatctattctatctactatctattccgcctcgggaccctgcagccaataccagctctttggataatgcctaggaccacccctttctaggcaaaattaggcaaaaataggcaaaaataggcaatgcgatacggcagctgtagcagtccaatcacagcttatggatttgggttcaacaagatcgcaagggatacggagtacgccgtgaccattgaaataaaaatatctcaacgtgtatactaaatatcgcgcatatgtcataacgtaggcaacctttggattgaacacagcgggcatccaaataagctcagatgttttgtgcttataagcgcccgaaaatcactcgacaccatacggagcatatggagtgcgtagtgtggaccttgatgccatcgctgtgggttcgcacgcaagatcggctgctggggccgaaggccagaacgttggatatttaatgcttttttactattttaatgtctcagtattcaacgctttctttgggatgtctgtcagataataatatatatcatatgccacggcattggggctgcatgctccaggcaagggtccctggctagaccatgagtcagcggcacgtggtacgggcgtgtagaaagtgccgatccttccatttgtactccggaggcaaagcgaaatcttcgaaaatgaactccccgagagagatggaccatgtttccaccattccatgctgaatcaatgttcgcgagccatatgcgtggattccacttcccgatctggatgaattcattcgaccaagccatccgcatgcggggctagtccaccggacgcatagaataatggacgatatgatatgcgggcgcaaccgactctgcatgagggaagaaagcggattcgggatgcccgtggagcttgggggctcagtaccatggactatgggattcatccagtccagtagtcaggatacatgtagtactttgacttcaggtccagaactgttccttggcacaacccaccgtaagccacggctgatgcttcaactacagaggctgatcttggctctggcaacgtcatatctctacatttcgcctagtagctgaattttgattttgaatttcttttttactttccggatgttaaaggctgtggagtcggaaatgacggtgttctccagataaccatagaagtaccatgcgctgggatcgcaatacccgatatgctgctatactaacgtcaaggttctttttttttcttttttatttctctttccccctttccctctcttccctccattcatatttccactcttcgtttcagttgagaattgcatgcagctcagcgaataccacctcaggtacccgcatttgccctaatccgtccagcacggatcgcttcttccaactggccgatcacccaggacttgttcatttcatttgagtgtaagtgtctgattcatctgttcaaatagaagaaacgataaacacaaaagaacaaaattcgctcacacgcgaccagtatcctatttatcatcttctcgagcattgcatgcatctgcgcatactcaactctcttgactccaccgagttccgacaaagtcgcggttcgtccgctctcttaaataaaaatgactggtccgaaagaatcgccaaatcttgctcctgtgggctgggactatgaccggaaccacaatggcaccgagttgtctgatatgtccgagcaagagcccaagctgaaggacttcgacatcgagagccagccccgccgcggctcgcagcataatgtcactgccatcgactcattgtcgatgaaggaaagtatcggtcgtcagattgacatcgagtcggagaacacaattaaataccggacgtgcagttggcaaaaggtgcgcttcggaccgatacggatattagaggcttgactaataaatttttacagaccgctgcattgctcttctcggagtatatctgtctggctattatgtcctttccctggtcatactcaattctgggtctggttcccggtttgatcctgaccgtggttattgccgccattgtcctgtacacttcattgattacctggtatgatatccctaacagccgcgaccacatgataagcctcggtgttaatatttgtataggagattctgtctgcgacacccggaagtccgcgatgtttgcgacatcggtcagtatctgttctgggactccaagattgcgtggtgggccacagcattcatgttcctcctgaacaacactttcattcagggcctgcactgtgtggtgggtgccgagtacttgaacacgatgtcaaacggtgcagtatgcacaattgtcttctcaataatcgtcgccatcatttcctggtgtttctcgctgccccgcacattcgacacgttatccaaagtcgcaaccctctcagcattttttaccttcgtctccgtcgtcctggctgccgtatttgctggtgtcgaagaccatccggcaggatacacgcccgcactgggagaccccaccgtgcttgccgtcccgctcaagggcacaacatttatccaaggcatgaatgcctttttgaacattagctacaccttcatcggccaaatcaccctccccagtttcattgccgagatgaaagagccccgcgacttctggaagtcagtaacagccgtgacaatcgcggagatcatcgtcttcagcgtcatcggtgcagtcacatacgtctacgtcggcaaccaatacatggttgcgccggccttcggttccctcggcgacgacgtttacaagaaggtctccttctctttcatgataccgaccatcattttcctgggcgtgctgtacgcctccgtctcggcccgtttcatcttcttccgcctattcgagggcacccggcacaagggcaacaacaccgtcattggctgggctgcttggggtggaatccttgctgcgctttgggtcgcagcctttatcattgccgaagtcattcccttcttctccgacttgttgtccattatgagcgccctctttgactctttcttcggcttcattttttggggtaccgcttatatccgcatgcgctcggaggattacggaccccgtttctttatggttcgtggaattcgaggctggctcggattcatttttaacgtctttttgattgttgttggtttcttcttcttgggacctgggacatacgtaagtgatgagtccttgtttggcttggcttgttggtatttcttatgctcctgctaacacatattccttctaggctgctgttatgtccgtcgtcaccagctacgatgagggcactgttcgcggcgttttcacgtgtgccagcaatggactataaaccccctgcagggcggggggtttgtaaaaagttttgtcttcatcttggcattgaatctgttgtgtacgttgtttccaatacaccgggtcattgactccggtgatttcatgactgatgaccgagaagggaagtggtcgatatacacatacgacttgaccacgtttggggtatagaactgtttttcggatggacgcggatggatttcaatgctgtgtatagcttcatggaaagggacgggttttgggatatgctccccttatgtgtatattttatccctgcattctttacagcagttgcacctttcaattcaatgcagatggtcggcctagaggttgcaatttcgctctccgggtttgatttgacatcgccgcggcaatactccgatggccttttggtctaccaatcaatgtagccatgaacctcaattgccttcggcgcaaggtgtggacgataattcgccgataatacttcaatggctagcctcttatatgttgaaacagaccagcgatataacctacagtctgcaagaagtgtacgtccaaattgggcaatcagctaatccccgatcgcctatcaacacgtgactttcccgctcggcttccccgacggcgaattggtgacttctagcagctcatttctttctcttcttctcttttcttttgtcaattcaattcttcagcattgattcaccatgtcaagcgtccgtattctcacacgaggtgttgacctcgccgccgcgagggccgctacccttaaccttccccgcgcctctatcggctccaccgtacttcggcgagagctctcctccgcggctatcgtacgaccaacagtccgtcgatcattgaaagccaatgcactagtcacagacgtagcttcacgtgctgcgaaccaggccgtgcggtatgcctctagctccagcgagcccctcagcaagacacagctctatgacttgcacctggagcacggtgctaagatggtgccctttgccgggttcgacatgcctttgcagtacgcggacctgagccatgtggaaagccacatgtggactcgcgagaaggccagtcttttcgatgttagccacatgtaagtgaatcatctccgagccaaaacaaaccgcaatggctaaccaagttcctcacctagggttcagcatcaactcagcggccccggagccattgatctcctgaagaaggtgactccttcgtcagtagacaagttagctccgaacagctctaccctctcctgcctccttgaagaaggcaccggtggtattgtcgacgactgcgttatcacccgccgcggcgaagacagcttctacttcgttacgaacgccggccgccgcgcagaggatttggcctttctgagcgccgagatcgacgcctaccgctccaagcacggagccgacagcatcaagtgggagatcctcgctgaccgcgcgctggtcgcgctgcaaggacccctcgccgcctctgtccttcaacccctcatcaacaccgcaaacactccctcctccgaaaccgacctgagcaccctctacttcggcaattgccgcgagctgtacctcaccctcccagacggcagcgcaactgcacacccactcctcatctcccgcaccggctacaccggcgaagacggcttcgagatctccatcccgacctccggcgccccatccctaccccgacaagtcaccgagctccttctcaccgacagcagcaaatctcgtctcgccggtctggcagcccgtgactccctccgtctcgaggcaggcatgtgtctctacggacacgacatcaccactgcgcaaaccccgcccgccgcagcccttggctggatcgtcggccgtgatcgtcgcgatcctgtatctgctaccttcaacggcgcttccgttatcctctcccaactcgccagcccgaagactatcccccagcgccgcgtcggattaactgttgagaaggggcccccagctcgcgagggcgctctcgtccttgatatctctgacccggcgaatcctgtcgaagtcggcgttatcacttccggcctgcccagtccgtcgcttggcggtgccaatattgctatggggtatgtcaaccaagggcttcacaaaaagggtaccgagctggctgttaaggtccgcaataaggtccgcaaggctactgtcgtcggtatgccttggattaccagcaagttccaccgtcctcctcagtagagggtagaaggtgtcgacaactcctctaattttatattggttttgttcctttcttaaatgcagggactcatgcgaaatactagcgttttgatttattatttggcctttgtatatatgtttccgatcttatgactgatattcatcacatcaaaatattcttttctttcttgtcatagttcacacaaatttgtatcatgactatcatttttcaatgcctacagagtcacaatcaacctaccaagtcaacatgattatcaagatgcaaagcaccaagctgcccactttcaacaacactctcccacctacgataattcacatcctcatccccaccaccactcccagcctccggcgccaaagaaggcggtaaatcctccagtccagtcccccaagcactctcctccttcccaagaacaagaaccaactccctcccctcagcgaagaaatcatgcccaatccaattccgcgtataaggcacgccatccagggtcgcagactgaataaagccattcccacccgcggcagcgccagtagcattagccgtgttatactccgcccaattcaccgtgcgcagcgttgccgttttccccgtcagcggggagacaatactgacagactcgaagaacggcactgtgaggaggtacacgctctgtcctgggttcgggaatagtcccatcatcgccatggcgacgaacgagcccatggcgcctgagtcgtcgttgcctgggagtccggctggcgttggcgagaagtagtctgggatgtaggcgcgcacgcgggaggtggattttgctggacggccggcgtagtggtattggaagacggttaggaaggcgggctcgttgccgatgtaggttatgtttcggtcgtggaggtagtcgaggcgggtgacgaagtttgtggggccgccgagaagggttattagggtttgcatgtcgtgggggacgaagctgggatagttagaaggggtgggaataaaggtcttcatttgttgggggaagcgggcttacaattgatactcccagatgctggattcgaaggtttcgcccgcggtgttttgcagtgagcaggcgtgtccgctctcgtcgatgttcgagcacgcgaggggatcttggacgccccatgttccattaatatgctttggctggaagaaaccagtgaagccagtgtcccttcctctccagaaagaggcctggtttggtttgaataagttttgccagtatcgtgatcttttctcgtaccgctctgcatcggccgtcttgttcatgcctcgagccatttgcgcgatggcgaagtcgttgtaggaatactcgagtgtgcgtgagacgctgcgcgtcattgtgccgaacccttcgtagtcgaagtcttccacagggatataatgtaactctttccagctgcgtagaccgccacggccttcgctggaccagtcgtacggttcctcctcagcgtccttttgcacagctgcatacccggcatcccaatcaatgccatctctgagacctttcaggtagacatctgccaggacattgtcggcattagaaccgccttgtgtatatcctttgcatagtgacatgcggcagtccggcagccagcctaggtggcgctgggtatcgatgagtgatcgcaccatttgcattaccgaggaaggatcgaagatagtgaggaatgggatctgggaacggaaagaatcccaaagacaatagaacgaatcaaagtaaggctcactgctctgccagagcgggttctcgcctgtgtagttctgggggttgatcatagtcctatagattccactgtagaaattggacagaacggatgaatcgatgtttgttcgtgagacacggatcgggcgcatcttctcggtccatttttcgactgctatctggtgggttgcgttgaagtcaaagtttggaatctcagactctgcatgagcgcacgcttgctctgtgctcatgaagctgacgccaactcgagcgaggaccgtgttgtctgcggcggactcaaagcggacaaatccaccaccctacggaatgtcaatccttgtctctatataaaagaaagggtttcgactcactggaagcgggtacccattgatactgcgggagattttcaaatcatgaacatcagcactggcacgagaattgacaaagatgccactatctcgctgggctgcagggcttttgaagtccgcacagaaatgtaacatgtacgatcccgatccaaagctaggagcgaacctcgcatcaccggtcattcgatttgttgtgttatccaccgagatagtcgcattgtcctggcgggagttcgacagatcggtaaggtccagcaaaatcaatggactggtggtgttatcacttgggaactggaagcgaaacagagacgtatggtgcgcagttgtcatatccactcggacccctgatgccagctctatagcaaagtatcccggacgcgcctgcacggagtcgggcttatacttcgttttccgttggttcttcggatagacacagccattgacatcatcgccggcgcattttgcatagggaaagagagggaaattccctaacgaaggactgccgccagtgccggagtcgtgcatgctggagaatccggtgacgctgccgccctcgtgggcgaaacctccttggttgctttctgagtctgtatcggcgacggctttcgccatgccatatggaagcgaggctcctggaaagacatttcctgtggagaattggtcagtagcatgaatttgactgatttagctgttgaacttacctccgttggcactaccaatcaagggattgatgtattgtagaacatcataatcttccaatagaggggtgtctgcggcattaactaggatgcgactggttgaaaataacgacagtaacaaatatggcagcatgatctaggttgaataaagatgatcgacgcgtcggaaaggctagtatttaggtaacccttcatccgcaactgcctggaatgcgtgcccctggcgatccctgtctgttacattacattctgcatattcccgtatgtggatccggggataggctctcatgttttcgagagtatgtagtgcaaggatgtactggaggttgattggtgagactcgtgtgtccggaacgttaggattgagaaacagtccaagacaagcgagattaatctagtaagactttgccgcaataggcttcatgagtattcatcaaaagcctaatttcttgcaagcatactcaaaggaagaaagatagcatatttcgccaaaggtaggtctcattctggcaaaagaataagacagaaagcatcgtgtcttcacctggctatgccgatttatcaagtaaagagagctgtatatatatattggccgcatccaccatcgtgtttcgccatattcttcttttgtatccccggataccggcttccacgacaacatttatagcaatttgtccgaccttgccataccaaacagcgtaactcggactcccggttagcatctgttctctttaagctttctcggggtatgatcatagcttagtgctttcctccttcgtcaactgcattggcgggacaccggtatcgtgttcccaaaccaacttgtcaatgcgcccattgtcgttgcattcaaacacggctttccagaaaggtgccgcttggtcccagcccacccagcggccacgtctagataactcgttccgtggaagtaaccaagtgaaggtgtcatcttcatagtgttcaagttggaacttttctgactccagcccttgcagcctccagtaaagcttgttgtccaccaaattcacaacaatcttgaacacattgatattatcccagtaagtaccgacatactcctctagtgctctaggtgatgttccgttctttcgagccgagcctagctctcccaccagtgctggataccacttcaagctctcagcgaccgagatgtgggctgcttcgatgtaatcatttctctctgattctggaacctcgagcagctcttcaaggatgagttggccaacccagtcaggaacatcatttagggccaaagagttagacagtacaacaataacactgtcagtgtctggaagtagaatcacaattgcgagggcgccaggtaggctgccctggtggaagagaatgagctgtgagggaacgcctttcccaacggtaggcatgccattggacatcagaccaggattgattccgatatgacctagccgattgggaagctgggctctgacccatccgagtgcgtatgatagctcgttcctcgagggttgatgcataggaattttggcggaagtgagatgagaaacttgtttgaagggagagtctttggtcgctcccttcccggtgatgaattgatcttcaaagctagcggtgaacgttttgtataactccaaaagatcacggatacaggaccacgcgccaccacttggtccaccgaaccaatcttggcctcccttagggtaaggaataggagtagtggatccatcatcaagtgcgttgtagcactgagtgacattttgggtgcccggaggtggagatttaaggtaggttcgatccaagccgagaggatcgagaatacggctctgtacaaactcaaaccacgaaatgccactgacttcctcgatgacataacctgcaaggttatattgaagattgttataggacattcctgtccggaacggaagaacccgcggctgtgaattgatgtatttcagtccatcctttcctggaatgagaacgttgttctcggtaccgaggaccacattaccagcccaagccatgcctgatcgatgagataggatgtccgtgatagtcaagtgattctgcagcgtctcgtcgcttgaatcaaaggatggaagaacgtccttcactagtgtatcccaggtgagtttaccctcgtcgacaagaatcgccatcgcagaggcagtcaaagcctttgtcaacgaacatatgggaaatattgtttcctcagtgacgggtagaccagctgctgtgtctcggacgccaaaacttgactcgtaaacagtgtttccgctcgacatgactgcgagcgagagccctggggtcccgccgatgcgcatcaaatcttcgatggtggaccgcaagcgatccagtcgttccgggagttctgccattctgaatgctgctcgggataatgcgaccgttacggagtagagtgaggaggtcgactaagatagattgtgtagagggggtgcaatcgcgactatgaaatgattggctattcctatagttatacccgcttttcccaccaccctacaatacaacatagtctccttatcaagtcagctgatctgataccatgaagctatttagagattacatgatcacctgatctgtcactatgaagtaattgaaattaattctaccaccattaatgatagagataatttaactctggaaatgacaattgaatgctggatggtagacaatatataattgattaaatgcgaccggtatttaatgctagctatagcttgattgtacaaagaagttgaggtaaggactcagcggggtgtggcagttttcaacaactaccagcgcgggacaggggaatacgagagaatcaccaatcagaatgcgacaaagttcgagcatagaaaaggaacaccggggggggggggggggggggggggatcccgcccccccccccctggctcnnnnnnnnnnnnnnnnnnnnnnnnnnnnnnnnnnnnnnnnnnnnnnnnnnnnnnnnnnnnnnnnnnnnnnnnnnnnnnnnnnnnnnnnnnnnnnnnnnnnnnnnnnnnnnnnnnnnnnnnnnnnnnnnnnnnnnnnnnnnnnnnnnnnnnnnnnnnnnnnnnnnnnnnnnnngggggggggcatggatcgctgccacccgtccctgagtccaaacaagaagcctttttaatcactgaaaagaaagctgagatgatctacaaccccatgttcttcttctttgcctcccggtaatcgactcacaacctcagccggcttctcaagactaagctccacaatcttctcgttcccagagagcttccacgagatcatagctagattatccttacccagcgccaccttcgcttccaacgcttctgccaaccgtagcctgggcctgaaaaatatcttcgatgagccagcagcgaccggctgaacacctgccagctcagtacagtactcataaattggcacactcccccaagcatggcaatcagacctttgtctaacgtcgtcctcctcccaagtagaaagattattcgctagcatcccccgccacggagcccacattctctcccaaaacgactcgtacaaatcctcgccagccaaagaaaatgccctgaatgcatagaaccgcatcatatacgaacaccttgagaagcgatcattggtaaacgattcagtcaagatccgtgcagagtcttctgcccttgccgctccacaaataacagcgaagacctgacagtgctgagaatacgacagctcatcggcaacatcggctgtcgagtcggtgaagaattgcccatcataacaatgagcccgaatagcccctagaagcgatgccgccctcgcttcatactcagcagcatgtcctggccgaccaacatcacgcaccagaccagcaacattttgtagaacccacgcgtacaacatactaaaataagtgtgtctattggattttcgtccggaggtcggaactcctttgtcgggatggtcgtccgttgcaccccaggtcgtcacccagtcaacatattgccagacgacttcaggcagtccgctgaccagacccagctcgtcgatgtgggcatcgaaaaagtcgagaataccgtcgatacgcgggatgaagcctcgcgcgaagcgggtatcgccgaagtataggtggtggtcgcagacctgcaagacccaatacagcgagaacccagctatgagttgcggtatttgtgaggggaagcgggactgtgtgagaccttcgggtgtgattgaggctgcaaagtttgtaattgcttggcgcatcagtcggtcgtcgcccgagaggaggtagtggaatagaccaacggagcggctgtctccggagtatctgaattgttagctggggtatggatttggggatgtatgaggcatactgtaattgttcgtagaatgggcaatcggaatacccgtcgaacatgcagtttcgcattgtccggatggaaacggcccagatctgctcgctgtgcgcgtctccgggctctttccagctggctttgacggccatggggtagttgacctgagtagcggcaaatgataccagctcgattggctcggggcctacagtgatttcgatcctcagaagacgaaaggttcggaaccaaaatggttcgtatatgacactttcagtgtcaggaagattaagtgtcacttcatcgtatggtccgataatgtggccaacacttgcattcagccggtcagccttggagcggaagaaagggtatgatcgaggctcaagctcatagccttctgagtgtgtcactttgagtctgatctgagaagtgtgtttggctgctttgaaggcccatcgaaggaatgcagtcgaatggacatcggcttgcacttcaagtgtatgagttgagcttgcaggaaggacgatagagtggtttgttgcgaagaaggctgtccaatctctgacctcgatcacactgtcgcatgctctaatggtttttacaacggctggggttgactcgggcatggggatagagcgtggacgtagattccacggcggaatatcgccattgagggtctttatcttgtaggcaaatggtaccaccgcaggaccggggtttgtaggaacaacgcgctcgctgatctgagaaagaatgtcagtgcaattcaagagggcttcgatcctgagccattctcacatgaaggaacacatcgtcagccaatcctgtcggaaactcaatgctttcatccgcagatgctctccaattcttggaagaagcaagatcgacgaccccctcgtctgtctcgatatttccaataactgtcaagcctggaagagccgtccgcgcaaagggtattgcgctcctcgaagtcgcgaagtaccggacaaccgtaaatcgaatctcattttgtccttcttgcaggtagggtgcaatgtccagcgtgtcgtaataccagatcaaaggactgctgcgactcggtccgacggcaatatgtttcccgttcacatagagcttgtagcgtgtatcggctgagaaatgcagtattgatttcgtcggtcgcgacgacaagataacattccgtgtaaagtgaactatcttgccagctgtgttcgcgtttgaagagtcagtccaatttggaacccagatccagttagcctgaagctcgtcgattgtctttcaagccacaataagtcagcaatttattccatatagcttgagatataaggaaaataccttttgctcctctgttgagaccatctttgcgcattgtttccgttcatctcgggagttccgacgagtttgtataacttccggcggggaagaggccgggggttcggaacatctcacaacgagaagaaacgcgattgaattaaattagctaataagagtttgcaaataatagcttttaggctggggggatgtattcagccaatagttcatgaaaccgaagatgttgaggattctatcacaataatatatagaagtcgtctcttcgccgactaagggagaggaggtatttaaaaagacataacaaggtcgtataaggggtttaccattcttgtatagtttaatttaagtataacgatataaccataatgtagtatcgcttacacttaagctgcgactacctcatactcctcgcagctgcacttcagtgacataacccttgaacttccgaagattgaccttcttctcgaacctagaacataaaacgtgttatccaaatccattaaaaggaccccaggtggaaggttgacatacatctcatcaatctcagccggtgttcggcgtgtcacctctggaagaatgaaccaggcgataattactgcaagtgtgcctgtacccgcaaagctataagaggtaggctgtcagcattttgcagtggcaacccgcacttaaagaagacggcaaaagactgacaagaaaccagtttttacaccccagtgtgagataggcgcattgttgatcatcaagggcgtgcagaaactgaacatgatagcgactaaattcgaggatgcaagagcccagccggctgtttttgcgcgcaaacgttgctgggggatctcagcggcgtaggcatagccaatagccgacgcaccagtagtagacaaagttgccaaacaagcgaaaaagatctaggtacagttagcaagttatccaaggttacgccgtcagaagggcttgccagaagtgagctggttgatggcttggtgtaatcgaagcagccaataattccgaggcataaaactgacacagatgtaactgcataggggtagattgtcaacggacgacgaccaagcttgtccgtcgtggcagcagtcataatcatagatatcaactggacacaagataaaatgaccgttaccgtgaatgggtctttgttgccagcatattgaactagaacgatattagcaaagtgaaagaacagtatgaaacgattagtactcacagaaatatgtagcgtaggtgttaaacacagacaaaccgacaagctgctgggcaatcttgggccaagctgcaataaagaaacgaatccgattgcgaccctggaaaacagcccatggtccctcttcggagttacgctctgcgacggtgcgctcctctgcaatggtggcagtcatgatttcctgataggaaattagaactttgttgaaatacgattgacagaataatcacatacaatctgctcgtcaacgctgtattcctcgatattgccattgcaccgagttaggatcttggctgccttgtcgagccttcctttgctcacgagccaccagggagattctgggatgaaggcgaagatgatggcaatgataccaaccatagcccactgaccgttcatggcaattgtcagtcactatcttgaccatgaaagctaaatcacacacgggacaccacgaacctgtgtatagatagggactcggaattcatatgagttatttgcgctgagttccttgagtgccactgacgcgaagatctgaccaaccacaaaccagctggaaaagaatcagcatataaagcctctgaggtgcaatcctcttaactcacaaactgtacgcgttgatatagaaacctcgcagctgagttggggcgatttcggacaagtagagaggtaacgtggattgcagcataccgacacccattccagagaagagttttgctgcgagccagtgatcccatcttgttgcgaaagattcaataaacacgctgatgacaatgtcgagccagattatatagaacgcgatttttcgaccgaacttctctgtggcatattggaggaactaaagagtagttagacactcgccagattagccctgaagatcggaaagacgtacaacttgaccgatagtttgaccggcggattggataccaccccatgcggagatgtatttgcctgcaatgatggatgtgcctggggaagccatctgtcgaataaaacccttgttggagacaataccgccattaagattaatttctgcaaacagatcagtataattagaagctcataggtctccaaaagcagtagcttacggtaaccatccagcgatgcgctaaatgccgcggtcatagcaatcagcgagacgatcttgaaccgtcgcacacaatgccagacaccaaggtcgtcttcgcgagatcgcatgatgggccccatgctcttggtaggcatgacattttcttgatgggagaaggcatcctcgatgttttcagtgttggtcttggaactatccatcgtaaaaataagtagacaacagtgtgtaccgagaacgaaagttgtaagttcttgtcaaatgaacatgagtagctggtattgctatattatcagctctttggtccaacttagagagctaacaaatattgatttgcgaaggactcagctattccaaccaataaatctgaatttacaaggctaaacgtaattcttagaagctctttgttcttactttaccccagattatacatcaaatatacgaaaaaattgactatcgaatagaacgcaacccaagggcctctacccctcaaactcccactagccctaaacagagaatccccggcggcataacgcccataggagggaattcaacccctccaaattccatacatccccaaccttcggggttttcggaggaagactgcccgagctccttcccggggaactaaggccgagtaattacaggtaaaccagaagagcttccgaagctgcaacagtgaaggttgctttcccgccagagacagtgactgtctctatgctctctataccctgaataatgcaagtgccgttggcaaatgtctggcccgcaacggtcgggttctgaccttgatcgacccgagacgtagcatagggagcagtcagccgtttagcagtaacgcctgaggaaaaaagcccagacagtgtatatatttgcgaggaccgtgttccgctggtagatatatagtagtcggaattgtagagaaggacccggacaggaacgctagccttgtagagggcgtaggctgcatatgctgtatcttggctatccagaggcgcaatctggtcggcgttggcgagcgccatgctggcgaagtaagcaccgtagtaaggggatcctatgtcgtagcggccccaccagcagtattggccttgaaagttagcttgtgggtgggtaagaagttctagataacttacagtttccaacggtaccctggtggaagtagagggcatttgtgcccatgaggacggtctgcatcacgtagtccaagatccagagcgcagcaccaaaagtcgggctgataccaccaccgccttgggttgctgaatatttttagtatttttatcaagtgacagtgagcagtaacgtacccgagttagtctcgccgaagatatgcggtttgcctttttcagcagctgcagaaacttcagtagcataaggcttgatctgggtggcaatactgctgtggcccataagagtagcaaggtcgtaggagccagatgactggggatagttgtgagagcaataatccttcacatagtcattcgcatcactctctttcgcggtaaggctagcgaggctcatgggcgaagtgccaaagtagacacctgctgagatgatatcagttgcagagagatttccgcacatcgcatcttgccaggtgacttgggatgattcatcagctgcagctgtccaggatgcaccattggcaataggatcgctgtcaacgaaaactgaacgcttaattagcgtctacacaaccaagaataagtaatttgagacctacagttgggctcattccccagttcaatggagtatagattgttcattttgctctgggcgagaagcgcggccgaaattgtgttcaagatatcgcccaaacgacgattcaatccaattataacttctccggcatagcctgcagccaaagagatgaaggacggtccgtaagtcagagtctcgggcgcagcacctgtgctggccactgtataagtgacagcttccgttgatgagctattgtatatcgcgcggtccctgcgtactgttaacaacatttattgaccaataaaagcatacatactgtgttgtgcctccgatccgcataggaggccatgttcctgtcagatccttgaggttctgcagacatgtcattgttgattcgacctcttgaatgtactcagggaacgcaaagaactccagacttcacggtgagtaattaaatctgccaatggcttagatagagactcacgatacaccaactggagctgcagagagctgctggctagaatttgaaggcggggatatcggaacattgaagctcaaactcaaagccgaagccgcgaggcctagaagcaaggctgagatgggaattgatgtcatggcctcaaaatgtcttccgtcgatgctagataaattgagttgtaagccaaagaaatttccaagacaagataaaggtcttgagtatacatatataggctataatgcaatccggtctctataaggaaacaatccggggaaccccacatttcattattttcaatcttactgtcgggttttagaatactcgtgctggtaaatatcaaggagcaattgaggataatataattgattgaaaaattactgcttcttttcccgttaaaatgaacaagggaagtcctgtactttgtatttcacagacttcctgtggtagcccaatatacattataattgtatccctgggcatcatagaaagggctcagtgtaacatgtcctccatcggcgatggagatgaagtcaagaccagaagcgccggagcgtttgatagagtcaagggcgagagtaggaatactactcagcgtttggtttccgtaattgccgcacaagatagttggcccataagcaactgcagcaatacttgaattgtcatttgcagccactgtacgcagactcatgggaaagcggatcacaacgacatctccatcggcccatatacgcgagatctgagcgtaagttccgggactagccttaacatcaggtacagcttttccattcagcgtcagctctgcgcttgatgcccatgtagggatgcgaatattcatcgtccagtgaccactgccgaagacttctagtttcgatttatccccgactgggtaagtcgtagactgtttcagggtaatacccatctccggccatttcaggacagaagacatgaacaagttgacaaacaacgtggagtcattgtagaagtagatcgagtccatcaactttgtgttcgtttcgattgctgttccttgacagcaccagaatgagtcgtagtccgtactccaagtaccgccaccccaggcgggaccaacaccacggcgacctccggcgttgagaggagtgaagtaagtgatgtggccatggtgatcataagggttctgttggcccaacaggtggttgagtaaggcgttttcgtagaagtcgaaatatgccgagttctcggaatcaacgagccacagctcgcgagtcagcttgagcatattataggaattacatgcttcacatgtatcattgtcaagataatcggcgatcgcatttggggcatggaagtgttcggcttggctgttaccaccgattgcgtacgtgtgcgatttgacatttatttcccaggcattccgggcaatatcaaggtagcgagattgtccggtggctttgtattcgcgagcggccccaatccactttggtacttgagtgtttgcatgtagaccgtcgaactcatctatgtcggctgcaagggggtcaaatataacgccatgatcaaagcgttgggcaacggtaagccatctcttgtcaccggtttggtggtagaggtcagccatcacttcattcataccgccgaattctgtttgtaacaacttttgcattgcatcgtaactcaacggttcggtgcgtttgtcgacccagctggctaaggacagtaagacgtctcgagatatagtgtcttttgtcaagcgccagatgtcaaggaggcctgcaagagtcttgtgtaccgcgtaatacgggacattgccgtttgtcagggtgctgttttcgagttttgcaaactctgattctggaaagccagatacatatccgtccgtgaagccagcagccttgttgttagcctggcatttggccagctcggcaacaaagtaggtcgctcgatcataacatgtttggtcgcggagtaccgcataacattgagcccaggcactgaggaaatgaccctggatatgcgaacggaacggaaaatccggagcatcccagccaccattaggcgttgcttgttttgtggataatccgtgggtcacccggaagacgtagagtagtctgtcgacgtctatttctttcaaatatctcagggtccggccttggttttccaggaagcggtcttgtgtcaattggactccaccaagatcgaatgcaaacgcctgagctccaacatccttggtatttgagctggattgtccatcgacgggaaagggaagagaaagaaaaaagcagacgaatatagcgagaggtttccaccaatccttggagtgtatcattttgaattgtttgggcgaattgaaagtctggtagataacctagtgattcagctattctttaggcattgtctgaaacacaaggcccttttatataagatatttccggtgggataagacattaatcgcattgttgtatatacaatgccaaggatctccacacaagtccatactccgcaccccatacttcttctcaaatccggagaattcatgcggggatatattttgcggagaaatgccaccggactcattcatagtcttctaaaggaaatatgccggggggcttgtagatcaatttacccttaagagcggagaatatcaaaggtcaactaaactttacaagagatctctagcctactataattctaagccaatcctaaaagacagattaaatctgatagactacaagttgatatctctcaatagagtagtctgcgcgaagatttcttatactttcatgcttgtttataggtgatatctagtctctttggcgaggttgaagaaagttcgtggcattgtgattgcgatatacatgcataggtctggctttaagcaatataattattatcattcaatgataagaacgaagcgtttcgatttgcttgcaagtgataatgttgagaagacctattattagctaccaagtgacactaaatcaaataacaccgtggctgttgagatatggggttgccacgttactatgttgtcttgttccggagtatgtacacatgtgtgtatttcgattccgaagtatagagtcagagaaacaataagagatcccatgtagttttaagtcttaataccctaatcaaatataagtctcaacctccgaagaggatgtttcggcgaagtcaagatgccgaggtaaatctcaccgaaatccacttcgccttatcctcaaccactgttttctcaacaacttcgccttctagatctctaaatttggatcgtttgctttaattgttttttcgctctttataatttatgatgttccgctcttttacttctcttcctcactcttttcgcaatatttccctcccctccacgctctctccctcacgactggtattccgcaactctctacccgcaactcccgctgctccgaagcgattccatagccggtcttactctaccggtaagttataaacagtccgcgtcctccaaaaggagctaacccggtaatcgtagcaagtccctcggcctctatctatccacccccaccccaccaaaaccagcgctctcgtctccgccgctttatcgggttcaccacgatcgctgtcttcacattcaccatcgggcttacctatcaaacccaacgcaccctctcacgcatcatggcgaccccaaatgacgaggaggtcctgaccgcattccttgacaccgactccgagatcacggagatcgagaacacaatccgcactcaccccgtcgcagaggccctccgcgcagaccccgacttcagcgaatcgcgcccacaccttacaatcccgggccctctgcgcgaacgcaacctgacagccggaacgctagcaggacccggcaagattgtcgtgccgccatatgtattcagcgagcgcgagggcaagaccatgatctcgctcatgtatctcggcggcgatgtctgcggtcaccagggtattattcacggtggtctactggctacactgttggacgagggtctggcgcgttgttgcttccccgctctacctaataaggtcggcgttaccgccaatctgaacattgattaccgtgctccggctatggcgaatcagtatgtcgccctccgcgcggagactgttaaggtcgagggtcgcaaggcgtgggtggaaggtcgtattgagactctcccgattgatggttcggagcctgtggtcctagttgaggctaaggctttgttcattgagccccgacaagctgctgtaagttgaaaatgttggactttgatcttttcccctgactaatttccccaggcgctctcgagtctctacaaggtggcgtgattgggaaatttctgtcctttccgaaatttctgcatttggttctcgttcctggttcctggcgtaatggcgaattaagagaattagacctttcatatgtaaatggtattagaattgagtgaagaaatgaatattatcagtaatatcaaagactatacaagattacaagactataagactataagactatactatagaatatctctgttgtacagagtataagaacggaaaaacgccaagcaatggcgacaccccgcggtgatcacatcttcttctgtgacgcggccgtcccactgcccctccctatttctataacttttccgggatctcaactttcttctttctttaatccaattaacctccaaaatgtcttcgtgagtcccaaccgaacccccaatgccaatctatccaaaaaactaacaccaaacagcaacatcaccttccacgccagcgccctgacccgcagcgagcgtaccgcgctgcgcaaccagcaaggtctcacaatctggttgaccggactctccgcctccggcaagtcaaccctggccgtcgagcttgagcaccagctcgttcgcgaccgcggcgtgcacgcctaccgcctcgacggcgacaacatccgcttcggactgaacaaggaccttggcttcagcgaggccgaccggaacgagaacatccggcgcattgccgaggtggccaagctgttcgccgactccaactccatcgccattacgtcgttcatctcaccctaccggaaggatcgtgacactgcccgccagctgcatgaggtcgccacgcccggcgaggagaccggcctgccgttcgtcgaggtctacgttgatgtccccgttgaggtcgctgagcagcgtgaccccaagggtctgtacaagaaggctcgcgagggtctcattaaggagttcacgggtatctcggctccttacgaggcgccggtcaaccccgaggttcatgtgaagaactatgagcttcccgttcaggatgctgtgaagcagattattgattaccttgactccaagggttacttgccttccaagaaggagtaaagtgcatttctttgggtgcttttctttgggattgggatatgcttgagattttatggatgtatctatggtcggctttacataaaagagtcctgtacagcggattagatacggtttttttttgtgcttgattcccctcccacttgctgtacatactgcgtggacaatatagatcgcttttgcacttgcattttatgggctggggcgagaatggacaatgggactcgatccccttttgctattcgcttgaatgtgtggtcattgttgaaacgaagaaactaaaaatatccaatgctagtttgtgctagatgtaccaaagtggtatatgtacgcaacgtcttctcgcagctttctatctcctatgatgcctcaaattggccttagttgaactcgaattcataaaacacatacggtgtgtagtctgcgctgccctcgccaccggggtgcatctcgccaggatcatcccgctgcatacggcccttcttgtctcgcccgaaggcattgcctgccaggtacgagtatttgttctcgaggttttgctttgcgcgatctgcttgcttggcagtttgtgtctgtagaaagtaaagaacgtcagtcgttgccacggtgaaacggaaaacagagcagaagagaacatacccggaccaaagcgcagacgaaatccagcggcaatccataccgcagcaccgtctcgacgaacactctcagaaccaaaatgtgaatccagaccataacagcctcactccaagccgtgcgaccgagtcgcagcgtctcaccccataccttacgctcatcaccaccaacgcgctcgacttccttgcgctcctcctcctttccaccctcgacatacttaaagtcgcggggaatccatttctgttcacggcacttatgcaggaactcggcgttgtgtttcttgaacgctgtcacggcgtacagcgtgaactcgctgtcggaggcgactagctgcgcggaccgcgggaccaccattggcgcaacggtctcgtaggtcttgaggaagtcttttactagctgggcgggcacggcgacgaggtgggtctcgatgtattcggagccctggatgatggttttcgggtcgaccactgaggcgagggacttggttgagagattgcctctgtatagagcgggttagtcatggttatgtatgctataagcacacgttgcagtgccatcatagtcaacatacgtttgtttccgctgcagtgtagacagcgtgttcttgacctggttgtattgggagtacttgaaacggatgtcgttgtcgatgctggccgcttcctatagtagacaaaagcgcattagcatataactccaagccagatatattcctcgtttccatgcgcggtgcaacaaaccttctgcaagagatcaatcagctccgccaagggcttatcggccctgtacttgactttgttccattggaaagtacgtaggtactgatcgaccggctctgtaggcagtcagaaccagaatccagacatcctcgcagactgtgttttcccctccacagccagatcaataccaagctggagacatactatcgttgacgaccttcatctgctcaatctgcgcctcgtcctcaaggatgttcttcaacgcatcgctgaccttggcaacgacactctgacacgaggcctcgagcttggccagctcgtccgcctgctggacaagggcatctagcgtgccgatcttgaactccgggattgggaaggagttggtggagccattgtccgaggagacggtggtcgagactgcttcgagggcgtcgtcgcggtggtgcgaggggacgatggaggtagggagagaaaggaggatgtatttgcttggtttggacatgattgattatgtattcgcgggattcaagggccttcgacgaggcttgggtgcgttttcggggttgaggggggctcgggtggcctcgatgtcgtaggcggtgggggcttgtaccactatgtccactctgccatttacaggaactcacttatacctccattattattgacatgagacttgggtaatgatcgcattggccggaaattagataaaagatattatattatcgatacagcgatcagaattcacgaagaatccctacgaaaagctctccatgtgtgtgagtatgaactaagagaacgttcaatatgaaaggaaagatgcatgaaatcatgatctcatactaaagcctgaataaacgtacatgaacgactttgcagctgcgtgaactgctgaatggaggtgcataacataacgctagaacacgattcaatgctcgctcagagtcaaaaaacaaacaaacagtaaaatgcctcaatggacaggaagtaaaccacacacgaggaatgttggttaccaaaacagccagtgaggctagattgaaccatagcgttagctgggagaacaggttagacatgaagaaagagaaggcaagacagggtatctttatcgagcgtacagcgctcgtaaaccaagtagagaagtagagcagaggtgagaggaactagcctgtacaaaagaatagggggagaaaaaaaaggttaaagcgcacgtgggattagtcaaagaaaaattgatgattagttagagattgtacccaagaactgggaaagccgaggcacctaggcatgatggtaggattatgaaagattggagtggaagtgagtacttgggaagagaagtatgtacttcagccgatcctagccctgctgcataccctggccctgctgcgtaccctggcccttctgcataccctggaaaactttctggcagttctccaccaggaacttgagaacgtcattcttcttctggacgtcagtcatctcacgagcgagactttcaggtcgcatgattgtcggcgcaaagaccactgcaacattctgactggtcatcagattctcttcgtggcgatcgacaacgcgtttgagatggaagatgaggaactccaggacgtcgcggtgcacgcgaggcagctcgaggagactcttctgcatgagttcaattcgcgcggacacagggttaacctcggcggaatcgatcacaagttcataaacttcgtaagtgatcaaggggttaggaagctttcggaaatactgtttcaaagtggatgtaacagcatggatatcgaggtcgggatccgagatatcgtaatcaaatggagagcgttcaaagccttcgcggatggtttggatgacggaagcggcaccggacttgcgataaattccttccatgtccatgcctgattgtatatgttagtataacgaccaaccggataccgacccacaaaacatacctcgcagttcaacctcctggatacaccgcgtgacgatggctggaatcatgcctttttcgtattcctggcgagcctcgagttcggtaccgaaaagagctgcgagagtcattagcttatactgatataatcctgaactgtagtatcgggcacataccatcgggggcagcttcaatcaacacaggcacgctgtcagcttgcgacatctttcctccctgcttgcctctttggtttccaaagaacccaaagccttggcgactcgggtcctgagtttgggaacgcggtataccaccgccactctcttgtccctgtcctccttcgctggacatgaaggctcccttaagacccttgacacctttggcaacgttctgtccgccctttttccagttgaatttgcgaggctggcccttgcgaatgctgacaacctgggggcctggcacgacagtggctgtagcagactcggactcttccgaaatgtgagtagatccgtgatagtcgttgaagggaggtttcatgacctcaatggaggttgtggatctctgcttgttgtgcgatatgccgaggccgttgggtcgcggttgaccgtccgtggctttgtagagttcttgaatctggtgaaccaactgattgttcaactcagctagctgtgcattcttcgaagacaattgctcgaattcctggaagctcttctcccgtcgaatgttcatggcttccacttcctccgacaggtcattgcgcttctgcatgaggtcttcaatttgtggggcaaacgagtctttcagcttttgaatggactcagccagctcgcgcagcacatggttggagagtttgccgaggtccaatggcccactggggccaccacgtttctcagcctccatatgatcagtgaggactgtgagctcacgtagaacaatctcgcgctgagcgtcaaggacaaccatggtagatcgcttttcagaaagctcggtgttaacctgcttgacatctgcggcggtacgagcggctgactcgagttctgcaactcgcagacgttctttgcgcagttcgttgcgaagccaagagatctcttcactctgtgatccagtgatggggctgccaacatctgttccggcgatgcttcgagtggtaggtgatcgagggttcttgagatctttgctgatccgcacactcttctcactgtagcttcgaccatggcggacagagtttgagacgcgccgcagaaacgactcgttgttttgcccaacggtgtcatcgccaccgatgatgcgcgataatccctcgtccataggcaagtcagctccataccgtagcacgggcgatgtgccggcgccatcgtaatggtgcgattcatgcggtgaggtgttcaaggcagtatgctgaatgggctgttcgaaagtatcgctacggagcataggcaagtccccgtactgcgaggatgcaggtgacgatccgacctcttttctcggaatttggtgaagcttgctttcgagtgaatcgccgcgctttggcagatatggcaagccggagggttgagagcgcggcaagtccattgaaccgtggtcgtgacgatgaagctcattcgaggaacgagctccagccgaagtgaagtcatccattggaatgtgtcgctttgtgtcaccggagaattcttttgatctggtgctgtcggggctagtaggcccaggaaggttgctagtctctctgaagctgattggtatgtcggatgagctacgagtgtggcgaccctttgcaggcttggatgaatcggaacttgataatggtgctttatcgggtgaagttgagttgttttcttcccaacctttctcctgataggcaatatggggagaatgattatcggaagatgttcgagaaggaggttcttgtcgatattcacggccgtcgtgggacgcttgattaaagtagtcgcccggaggctcctgccgtgtctgtgagtgaccacgggaggaattaccctcagctgaaggatcaaaggcaagaggaattaacagttcaccgccatctgcatctgcatcggtgttgtgtgaaattgattgacggttgctgcggtatgtgctggagggaagaagaatattatctgtgtgaatggtaagtaagagctcgtgaccgggcgacaagacaccgcgcgagaagggttccagccctgaacgcgcgaggttatattcttatagatcaataatgacaataagtatatgcggtggcaacgatggtgcataaaaggatacaaagcgctgcaaagaccacacacaatgtgaccacatgtgcacgatatgacaataaggtgacaaaggctgcgatgattatacatctagactgcaacaagggtttcttacctgaatcagcctgctgatttgaaattgagcttccgggtccttcatcatttagatcgggcgtttccgccattttactagggtcaggcgtgcctgtatattcgctgttctcctcatcgtttatttgcgattcttcaaggaggtggggaggcaacgagggcaaggatttgtccagcttcacattaggtgctgctggttttttcccactactgccgccggctttccgttttctcctccgtgccattagcgattcgtgacattccatgcagaaaataccctgcgaagtacgcgcatagcgcaagttctcaatttttcgcttgcaatttcggcatcggaagcattgagcacagaaagcctggtctcctgttaagatggccaaatcctcaatcttgttgttgcaggagctacaactgtatgtgcagttactgcatataagtgatccgtcgcccaaaaggaggaggtgcgcatccgaatccagtagagtgttgcatgtactgcatcggaaacagtcgatgtgccatcgatttccagctgccagaggttagcgacatgaagaaaatggacaaaaagaattcccccgcaatatcccacataccaagctcaaatgcttttccttcttcaagggtctgccaggacggttagtcaagctcctgtccgctcactccacccacagtgtgcctacctctccacagcccttgcatgggtaggactcgtcctgctccatagactccggataagcgccctggttctccatcttgagatccaccgtctaccgcgcaaaatgtaaggtcgactatggccgtagatcgatccgaatataagtctggcgggggcgcagacttagtccaacaattatgtgtatccgggcgattcgtgatcgctacagaagatctcactcgcagtcacatgcgccgttggtgctgctggcttgaagatgcttcttgggcgtaacggcgggacgccgatattagggagatagggacgtcggtgcgggtttggagggggagatgcaacaagtgctggaaggacgaatggtggctgaatctgcagactaccgaggagttaaaaacgtgatccaacactaggtttaagcgtaagacaccagtccgcccaatctgtcctgaactaagacaagcaggtcggactaggatgataacggcaatcatttgcctatgaaccaaggatcatgaatatcaatctctcgacataccaggcactgctagccgtgctacagaagtgtttcagataaatgatcgcggatgttgtgatcattaagcgcaacaggcgaagcgaaacggaaattgcccctcgcgggcgttgaattggtttggagattggacagacagaagccccgaggcaaaaggaaatgagatccgggagttaagactataatggaaaagaaaaagaaaagaaaaagcaatgaaacatgagactgggattagggggttggagggatgagaaaggagagactagaaggtgaacttttggctttctgccacagaaaggtccttttccccacgtaacttacaatatcatcatattaagtactctatcctctagcaatctttttcctttcacgcggtatagatctaatattattgtgctctgtaactgcccgacctatccttgtctaaattgtaccttaacccctagtatgtacgctggtacggagtactttgactgaggacgcgcagcccagaacgtgcggagtttcatttccccaatgcaacgaccaatgggcttcttgatacccctgaattttgtatctgatttaatctccgctaaagtgataatgaagagggtactccgtacggtactattgtattctcccaacaatatcaacccaattaaaaagccaccgtctgtgaaagaggcccaagtcagcttctcctgggcagcttcggatctggagcatttcacctctgaggatcgctccatagccccagtgttttgaccacggtacgagtattttgtctcaaacacttctcacacgctatctccggccttcggtccttcattttcagtctctacaccgtagtttcccaaagactccggagcctccatggagagtttaatgatattcccgagaagctcaattacaacctgaagacatccagccttaagggcagtgcctacattacccctgatcctttatattgaagcccaggcctcccgtgctgtttggaggatgtgaaacacttgccgtgtcacgtgagagtcaatgtatatgtacggagcctctattaatagcccggctcatcttttcaaacactttaacatacggagtaaagttgaacgaaattaagtgtcgagaactcccagtatatgtatcaggattgtctcagggtgtgtcaggtctaccgaatgttttgggttgcggtactgtatcatgttctggacccctaaaacaacgcctcgcaaatgaaatacatcataggcaccattattgtaaatattcggtgtgtattccatactccacggtggccaatgatatactgggtccacttgcaattacatatcaatttatcttgtaccccgtgcatacaacatagatctgggaaatgggtatctctacttcgtgcattgaggcataatgaccacccacaaagacagtttacattcctagcatataaagtgtaatactatccaacatgtgttcgtaaaatgaagaataattcccatattaatacacagtaccgtttatcaagtacaatatgtagttgggcacgtaccactggcggatcggcaggagtggagtttatacgcagccatgacatcttctcttcttattttgtacgcttcttcgaccgtacaaatccagatgttaattcacatgcctgactggcaaaaacaagatcaacgtattcaaacgtgcaagtatgggctcttaaaagtcccagccaccgatgatccacaaccatttaatgatgggtctgcaatgaaatccgttattgaaagggtgacagggctctccaagtggcactggtaggatatagtatgatatgcgcagctgcccgataagaggacccgtgcctggcgtaaggctgagaatccacattcagacgatcagactacaatgtctgggcataaacaataaaggcccacacccccgttctgtaaattttataattcgtctcttgtcgatcaaagtcgggttcatttcaattggatcaaacgctgacacttggattacgttggtatattctaggtcagttggtgcattagacgtgcgaagatcctgcagtccttcatgcggcaattgcaatgagtgcgcgtcatcaacttgaagaggttcaaacggaataaatcgagaatcgagaaagtatgcttccaaggcgataatgcccatgaaaagagtcttaacggtaaatctttggaacaggatacatttttttgacatgtaaggaaccacttagggaaatgctaccagatgcgatacagaaaggatcgcatgttttcgtatgagtagggaatcatacactcgaggattccaaccactcggagacgtagatcatgtgaccacaatgaggcttgaaggacccccactttagaaaattacgaatcagcgttgcccctcgaacctcacttcttctttcatctctgactttttatcgtctcaccttaatacgaacgaatttaaaatgggtgtcgagagaaagattattactcgtggcaacggcactgactcgcctgcttcgggtgacaaggtcgctatccactactcgggatggctctacgacgctaagaagtccaacaagggcttccagggcaagcagtaagctgactgccatacctagagtcatttaggttatgaattgagtattttgtatactaattattcatcccaatagattcgatagctccagaacccccggccgtggccctttgactgttcagattggtgttggacaggtcatcaagggtatcatatcctcttttttctctctctcaatagaatcattcagactttcaattatttaacttcttcacattccaaattggatgctaacactacctctctgtctgattaggttgggatgagggtgttttgcagatgaccctaggagagaaggcaaccctgatcatttccccgtgagtaaattccacatcgaacaagagaatatcggactaccactaacatatttctcagggactatggctacggtgacaagtatgtgaacacactcgacatactgacatccgttagctgaaaatgttaacatttcgtttctacacagggcagctggcaagattcccgcaggctcgactcttatcttgtaagttcgtgcaagtggataatgctatcgggaaactaactatgttacagcgaggttgagctccttaagatcaacaacaagagcgcctaaataagcaattgaattgagcagacaagcatggcattgtcagctattcactgcgatactgctcacatcatacagtacaagttaatcctcatctgggttgcgtttcattgtacagagtagagtgttggtaggtaaagcacactggttaggtaatagagctcgatgaagcctggaaagcgccctctctgtccatcgagtacaggtatgtggaacaataaagatcattaaaagtcgctaaaagatgtatgtacatatgccatatatacagaacgaaaaagcagagtgaaggccgacctagagacggtgttgaacaagtgactgaggcgccggagttgggaccgagtttttctcagcaggctcttcccagcgcaagatacgagctattttgttatatgagtcgataccgcggcgagcgtggtcggcaggaacaaatggatcggtctctccgagagttcggctaaagagttcaagagaaacccagccgcggaagccgagatcttcgaagaagacacgagcgatatccacaatgggcagataaccaccacgcgattcctcaaggggaaatagacgagcgttacgggaccaattcatgcgggcaggctgtccagcgacatagaaaggatgcttctcatccaacggggcggaaagacgctcaccgtcaacaagctggacatagaagatcttggccgggtcaatattggcaatgcgcaggcgctgcaatgaggcagccaagtccgcagccgcattgggggtgcgacccgaaggactagcagggtctgcatatacacgaccggcgatattgaaggagtcaagacagagaccaaagttgcgacgattgacatcacggaccacctcccacgaggcctcccaggtatcaatgtgatccccccaacagagagcctcgtagacaaagcggaaaccagccccggcgcccaaatctgctaagcgctggagatcacgaacaatgactgtgcggtcgccagtggtgcgggcagcaccggtcttcgggtctggacctaggaagtttgacggaatctggatcatgtctgtgcctagcgcccgcgccagtgtgaaccatttgggaagtttctcattgataagccgatctgactccgcgcggtcgatgaggccctcgtacatggaaaatggctgcaggcagataatggtcagccctaggcgcttacacatcaaccgtgttgaccgcgcggcttcgtggtgatcaccgctaaatacccgctgcgcgtagcagtctagatcgtcgaagaagagttcaatgccctcgaagccgtgggctgcggcttgcatcagcttgccgggtaggtcgtgtacccagggccgacctaaggacattgaggcgatagcgggacgattgaaagccatttggaagttatgaatgggtacttcttttctatgtcgatattataaattcaaaaggtgggttcgtgtcagtctttcttctctttttaggaaagtttgcaagcggagatattaagggagcgaggatttctcaacaatattaggtgttttctaggtatcaaaagggaagatactaaaatgattgcgacaaaacgttatcccctacggtgctttctatgattgaacgtttttcctggtctgctgtgattcgtgtcttgatgacgaggccgaacctgatagagggtcatatgtctgggtaaacgctgacccgctttcgttttcccaccaattccaccacgcctggagtgcactgttccacccaccacgcggaattttgcttccccattaaacatgcttcctgcccacctgtccttagaaggaaaatacccgtagatacccggcaaggtttttaccgtgctggtcggaatgtaaccggagaaccggtgccgaatggtcatgctactcggagtccggcgcaataataatacactttctgcttcagctctacgggttacaacgggtttgaatttgttcaattctttcagaaccgaaatctgcttttcatcccaatcatcgccatgtccgtcaaggttgccattatcggcgcaggccttattggccctcgtcatgcgcaatccgtaatctcaaacccctcaacagagctaattgcgctcgttgacccaatgccggctggcgaagcaaccgcatccagtcttaaaaccaactactacccttctgtggcctcactacttgcatccccccaccgtcccgacgcagcaatcgtctgcacaccaaaccacacccacgtccccgtcgcaaaggagctccttgcaggtggtatccacgttctccttgaaaagcccgtaagcgatacgctggaaactggccgctccctactagagttcgcccaagccccagagcgcgcccacctcaagctcctagtcggccaccaccgccgcttcaatccttacgtgcgagctacgaaggccgccctagatgctggatctctcggccgccccattgctatcaacggtctgtggaccttgttcaagccagatccatatttcgccccgccaacagactggcgtgcatcgaatgagcgcggaggtggtgtcatccccatcaaccttgtccacgacatcgacctcatgcaccactttttcgggcctatcgtgcgcgtgacagcagagcgcacgctgccacagcgcccaagcccaccacacaatgctgatgaaggtgctgccctgacgctgcgcttcgcatcgggtgttgtcggcacgtttctggtctgcgatgcgacgccgtcgccgcataatttcgagactggtacgggcgagaacccgctcatcccacggacgacgactggcggtgactctgatttttatcgaatctttggctcggatgcttcgctcagtgtgcccgacctgacccgctggagttatgatgctagccctgagaagagctggaattcaccattgactgttgagcggattccgcttccagatgataaggcgccttttgacctgcagcttgcgcattttgtcgatgtcatcaatggagatgcggcgcctagctgtactggtgaggaaggtttgcgtgcgttgattgtttgtgaggctgttcagaaggctatgtggtcgggtcagcctgtggatattgatgttaacttgttggcaaaatcggatgactagttagctacagactgatgtgagtgtgagtttactgatctgtgaggtgcgtgtgtctgtttgatcttcttacaatatgtccaaaagggggatgacaagacactaaggggtatattcattaggtcatttgcttcttttaaaccagcacatcctattacacgcagaccacatgatgtgcaatcctaaataattgcgagcgcggtttggcacctcgtccgacaacaaaatcacaacgcggcaaaagacaccaacacggaaatgattcaccaccgcatcgttcaagcgtactttggctgagccgaagtatcctcgacttgctcagtgcgcatctttccagtatcaatgccagcagcctcgacatcgtttcggaaaagctcttcattctcacgcagctgggcgaccatcttcccatgggcatgccgcacgggcttgatgtcgaacagctgttccatgctctcaagaggaatacccttggtttcagggacgaggaaatacacgaagacaatggagagcatcattaatgatgcgaagaagaagtatacgccgtatcccatggctgtgaacatctgcggagtgaatcgcgagacgaggaagttccagagccagttggaggcggcggcgcaggcctgtgccatggaacgcatgttaggatcgaacatttcctgcagatgctgttagcaatatgtcttaacgcttgtggattgattaagtactggaacaatgttcaaatactaatgtgcggatgcttaccgagttgaggacccacggggtaccgttccaggttggggtatagaagaccgtccacaggtagaagaaaaacatggctgcgataccaccgctgctcaaggactcgcttggattattttggggttgggcaaccttgatgtacgcgccgacaatccacaaacatacggaaccacctgctgcgccaaccaacagcaggttacggcgaccgacgtgatcaatcaaccaaagcagccaaatgaaagtcactatggtcttgactacaccgaaaattccagtggtgaacagactggtgttggtacccctgacaccaatctaaaagcattattagcgtcagtcatgaatgctcacatggatcgcaacaagattgcgacttaccgatttgaagacagtcggactgtaataattgatggcattgataccagatccattctgccagaagaacagcgcgcttccgaggaatagacgccacatgactttcttgttggtcccagccgccttgaaaggtttccagaaaccaatgccaatattacggcgctgctcatccagggcttggtcaatagcaccgatctcctcaatcatatagatatcgtgctcgggcaattggcgtatccagcaaagatttttgatagcctgctcgcggcgaccgcgtccgaagagccaacgaggcgattcccggatgaagtaggcaccgatgatcaagagaccagaaggaatcaactgaatagcaaaaggaatgatccattgcttgtggctaggtgccatggtctcgtcaataccgaactattgatattgtcttagtatccacaaaacaacccggacacaaacgaaaaggaaaactcacattgatccagaatcctacaagaccgccgatctgccagccaagctcatacacaccaaccaacctaccacgaatagccggaggagccaattcggagatgtagattggggtgatgttagatcccgctccgacaccaataccagcgagaactcggccaccgtaaaggagaccaagtcctcgttgaccattagcaccaagcatgataccagcaccgagagtgaaaaccaagccagaggccaacaggccaaccctacgaccccagaagtgaccaatgggatacacgaacaaagcaccgaagaaggcaccagcctggtagcaggaaacgatgttggcgctgatcaggttcttggtagtagtagacatgtcgtcgaagtggaactcactcttgaaggagtcaagagagagcgtagtgccgatgaaagcactgtcgtagccaatcatacaggatgtgcatgatgccactgctgccagaagatagattctccagttataaaccacgctaggcgtcggccggtcctcgaccagcttcaggatagacatggcagcgattcaatatagaagaattgaagaggaaatgcaagagcctctgtgaccagacgacctcgatccccaatgctagatgcagagaggcagtaggatgtatcaagagatgtatgagatgcaggtgcaagcgcaaggggagagaagaggaaaccaaaaagaaagcctacaccacgttttctcgcgagggtgggcaagatataaataggaattgccccggactgtcgattcgcccttggaaaaagagaggacagaatctggggtttggaaagggggagaaatcgtggggatgcggagtcggagaaaggtataggacaggttctcgaaatccgaaaaatgaagaaaaccaaggcgcggcaaaacgaatactctaagttcttctgtgcgtgaggacagttgcctttgttgcctcttggcacctacaatgtggcttgctaccaagaagaaattgactcagagggacatgcaaactctgccgggctgccacgaagtctacaaaccgagatcattcgcttaagacgttggattgtggagatccgatgccgctgggagaagtggggacttccccggcgggtttccagtaacccgcgacagcgtgcatggtcagctcgatctttctggggtaccccggaggcaatgcagtggacgatctagccctggtgtgaaatagcgaatggttattggtctgataagatgaacggaaatggacccatgactaggggagggagaaaacggccaatgaccgattgctagacatgggtggcggggaaaagcctttccccggaagcttaaggcgaggcgcggccactgtgaagtaatccattggcgactgtctgccggagcaattatcagttttcaagtcatcactcgtattacccgcgttattttcattggctcctgtaaagttccctttatcgtggggtagaggtggttgttggtggctgtagtagtgggaaatcattcagcccggcagatgttctgtcaacaatgaagcatcgacttttcatctcatgaaagaggttatatagaccaacaagcaatcatttctcctcatatgtagaatatgataaaatgatatttctcgagggaagtgggataggtgaaagagtagaatatttcgttgtttctccgacggcttatcgctttctcgcagattccacgacgcctatttgataggtcatgtgatagttgtatcaatgtgatcgtacgtaccagagtagctattgaagagggtatacgatgggcagtctggcctagcagataagacaagggcgacgcaacaacactaaccatccaaggaggtcagctagcaagcatagggaccatacagaccacagtaattccctctatcttagtggagcaacatcatataaaacccttttcattctatgggatcctatacgctaagttctatctgacaccctgtctgaaaatatagcaactatctggggtttccccactgtacgggatcatcatgtatctgtcccatctttcaggcagaaagaagtcaatgccaaaagaccgggtcacgtgatacgcacgaggcttatgatttaattgcttcgcttcgctccgcaattagtacagatcaggtaataagtgatctctgaatacattcgttgtggcttcatagtgggaaatggctcggttcaatcttcccccgaactgaaatgtaggaaagccgccccacccggcagaggaaatatccatggtacgtatacggaacagtgactagtgaggctaaggattttccgtctgaatttcgaatttcgtcttataatattgtaggctcccttctgcatatctcagaaggtaaatatacacaatcatcatgtccgtcacagaaatcaaccaaacgcagctagaagagcccatcgccattccctctaaccgcgatggcgtcgcctacctgtacggtcaccctcttctgaactcgctctccccgcctctccaccagacagtctacaacgcgctcggtctcaactggactcaaatccccttatctagtgtgtctggatcatcagagacataccctcccccatacacacggtcgccgccgattgagaaatatctggcatcgatcaagtcgaatccgaagtttgtcggttcgtccgtgacaatgcctcacaaggtcgcaatcatgccatatctcgacgacctcaccgaacacgcccgccaagctggcgcctgcaacaccatcttcctacgcgaggacccaacaactggtcagcgtcaatacgtcggcaccaacaccgactgcgacggcatccgggaggcccttacacagaatgcacctgacccaacacgcttccgcggccggcccgcgctcatcatcggtggcggcggcactgcccgcactgctatctacgttatgcgccgctggctcggctccagtcgtatctacatcgtcaaccgcgacgccgccgaggtcgccgccatcctcgaggaagaccgtcgccgcaaccctgaccccaatgctcaggctcctcttatccccgtcactgaccccgccgaggctgcccgcctggaatcccccgcggctatcgtatccggtatccctaactatcccccgaaatctcctgaggagctgcgttctcgcgctatcattcaggctttcttgggtactgctgcaggtgcggagaagcagcagggtgtcatcctggagatgtgctaccaccccacgccctggactgagatagctcacctggcttctgttggtgggtggaaggtcatcctaggctctgaggctttgatttggcagggtctcgagcaggcgcgtctttggactggaaaggatgtcatcgggacccctggcctcgtgcaggaggttaaggatcttgtttccaagaccattgcggaacgtggatctgcgaaatctaccctgtgatttcttttatacaatcacgtttcgtttttttttttttttttttttttttttttttttaaagccccaaaacccctggcctcgtgcaggaggttaaggatcttgtttccaagaccattgcggaacgtggatctgcgaaatctaccctgtgatttcttttatacaatcacgtttcgttttttttttttttttttgatcattgtatagagcccaaaatagctgctagttgcattgtgtatatataatagatggtgtcctcattttgtaatacatctcaatatgtatatctgtacgtctcatcagacctatacacaataaaacaagatcaaaaggctaagccattcaagctccgggtcgtgagtattccagattacggactcggcgccagacttcgcgtactgtccgctcctgtgtttcgcggcctgactcggttgcagatgggccagcgggtctgaaatgtcattagcaagatccaacactagaagggaaatcattcaaagacgcacctaattgctaaatacaacctgctgccaagtcggacatcttcgattggcgccgtatccacattctctgggggattagcagtagtcataagtccaccggcctccagaagaatagcagcaccagcagcgatatccctgtaatagtcagcctcagcatacctatcttcgactctccaagagatagaagtagaaaaagagaaaagaaaagcaaaactcaccactcccaacaacctccctcccaccaaatatcaaaagaacccattgcaacatacgcaagatcaagcgtcgcactgcccaaactgcgtacaccatgcaccataccacctctcccattccgactacccacctccgcagccatattaacaaaactctcaatcttgcgatgcatatttccatcaggaatatcgcggcggtctttaccccactcgcaagaaaagatacactgtgaaggcgcattggcaggcattggcggggtcgggttgtggatgagcggaagacggcgagtctcgtttagccaggctccacgcccgctgcaggaggaccagagctggtctgtgaatggggcatatattacaccaattactggcttgtgttgcacgatgaagccgatcgagacacaaaacatggggaaaatatgtgtgtagtttacggttcctataaggtgggttcattagttaagtgtcggtttagaacaatgagcagtcggtcatggcttcagggtcctgatttttaccatctaatgggtcgatgcaccatgttggttgctcgtcaatgaggtagtcgcgcgactggcctttggcataggcctcctcgccgaggaatctaggggtctgttagtcttgttgccagcagattttggtaatgatactaacttgtgagaggggtatcttgcctcgagggcgcttcggatgaatacttcgacgtctgccaggtaacactgtgagcgagtctgatatgccttatcggctatgccgccttaccttcgtcggtttgtgtcacaatatctactgcgttttccttttcctcaaaggcgtaagaggagccatttgcgcctgaaatacgctggtcaacacgctccatgagcatcttgcctgccttgcggcccaggtctactgcgaaagcgtatatctcatccagctcatctcgggaaaagggtccgacggccatggtgaaacagattaatggggatgtgtggaagcaacgtctcaaaatatgttcagaagcaaggtcgaagggaaaagcctagcttcttgagtcatccggtgaaaattggtgtgtccaaaacaaccgtcactaaccgacgtcgggaattgcttatcgagacgtttccccactttatggggaaatttatagcttcccttggcgatattactaaaactcgtagttctatgcattgctgcttcacttgactcgctactaattttctctcttctaagaatggtatgaaaacaacggattttgcctccccagtcaagcggaagtcatcattttccatgatgttatatgcatgcaagtccctgtatactgatcaaaccgaacagcataccctggaatcatagaccgcatgatgagatagtcgatagcattaccccatttagcggttccattcaaggttcgccggatacctcgatctaggctttctgtgagccagtccgagtataggcatggttgcactatagtaaggtcaggaggagcccgtgcagtccacatttggagcagaaaatcagtcatgtcatttagaaatgcttcgcgttggatctgaggaatatggagatttcagatagtcagtggcgtaccattgaccctttccgaatatatgaccgggtgttttgggctgagaaaaaggcttggtgctttgattgatgtacattgttctttcaaacatcagaaagttttcactgcacgtagttcgtttttccaattattggaatcgtgaccgactcgagcagccctctctacagtatcctcaaaggcaattttgaatggtctgtaggagccgccatggcggggtgttttatcgccaaaggaggagggaacccctaggcggagttggctggcctccgagagaagatctggcaagttcaccatgctgaggcttttaagtggtctggagctgatgtgaagcggggggtacgggggataaatggagagagaaccggtgagtgtcacagcgccaaggctgtttgcttgtgacgcaacggccaatagatcaggacattgatccccttactgtgtagcaacgtgcgtgggctgatcctagtttttgtattttatattatatttgcgttgaaggatgtgtttccagttgacaaatataatgggtataatatatttcgtgtggcttgtcgtcttaaaaacaacggcatctgcggcatacagttgggaattccactgatttgatacatgaaaagaatgtgaatacgcatatcttctggcgtgggtgtgccgccgactttcctttgactcattattatgctgagtctgaagatttaagaatactcttgcatctaacattgattggatcagaagcaagccaacgaagtttgtattgtctgcggcaatgtgtcatcagatacagacggggaaggaatatcccaagtttccttgtatctgaattcgtcatggcacagattgggcagttcaccactagctgcggttgatcatcattcatagaaatagctggccatattcaagtcggctgtccatccatttgctgtaacctgtctcgtatcgcttcatgatcattattcccttcatcgtctttgtactcttgaagcacaatgctccgcataacgcgcctaggagcgcggcggccagtgaacagttcaaactgagcgaagccttgttctggcagaacatcaaggccatccagggctacccaaccgcgatgggatagggctcgtgtttgtttcatgagaggggtattgaggggcttgtatgcgagctaaaatcattggttaggaataaaacaccattattttgggttggtacaagagtaaaaaggaaacttacgtcaacaacaacgccacctgtcgggctctctagccattgtgctggcatatggaaattaggtgctagctcgccgccaatgctatgagccggaattcctgagacaacgatcgtcggctgtttgaaatcggcaggccaggggtcggataatgaagcaataatgcgaactgtgggacggccagacccgctggcttcttttgagtgtagatcttgccggttgtagtggtgggccagtctttccgcattggcgatcgtacggttgtagacaaagatattttgcacaccaagatggatcatggagtaaattgcagcacgggccattccaccagatccgatgacaagacctgtcgatgatgagcgtatcgcatttgccggagacagaccgcggcgaatgcaattgcagataccaatccaatcggtgttatcaccgtgaagtcccttgatagggccggcacggctcttttggagaaagactgaagattcttgaagacggttgtcgtccaggtcatcaaggttgcggatggggatgagggtattgacggcaccgatagctcgtgcatgcgcagacattgagtggaggagagggatacactctgttttgtatggaagactgacactcgatcctccgaagtattgattttccacaagttcatttaatccccgtagagtaggtgattggtgaatggagtaattgtgcggcaaaccgcagattttgaaagccgtgttgtgcatcgcgggcgacatactgtatgtggtgttggcgccaaagacgaagaattgcatcgggtccaaggcaaatgagctatagagcgccttctgcacttcgcgggctgtgatatacgatcgtaggtgagttggaagttccgttaccaaggacggatgtgtgactggggagagaataggattgaagcaacgagacatgcggccaagaggaccggtgttataggcgatcagcgaaatgccagcaactggcaggctttggatgcgatggcgaaatctttgcaccgcgaggttgtcttcgggtgtctcagccggttggcatagtcggactatgtcgcatcctaggcttttagcccgctcataaacttccatatactcatcgccatcccaacccccgggcagaggatggaaggcttcgaagtggccaatgatcctggttcgtccacttgaggagatgatctgggaaatgatattgtcatcccgggtgaggtcaactgtgaggaaaccggtggagagtcgcaagccatggcggacgaggtttaggtacgtttcatcggtacatctcaagggaacttgattgggagacagagatcctgtaggggtggtatagctttccacatgatatatcaacggcacaatgatgttgcgacggattgttgctaccgcctgactaatactgtccgcaagacttgagctgaggcctggctgaccagaagagtctgttacatcgactgccagttcgaaggcatcggcggtgaattccagctgctcaatatccatgcccttctcacaaatcttagaaaatggcactgacactgcagatgtgtacatacgagattccacaggcaacagcgacagcgggaaagatgcatgctggctgttaagttctgcaatgtccccggttatgaaggcgatgaaccggagaaagtcccgctgaactcgtttcaatgttaaaaacggaatgggagtatgtgacctaggttctgttcgatacgtcggtgatgcaacatcgctatcacttctggcctctgacagattgaaaaattcgagattcgagcaccctcggtatatcggtccggacaattctaggaaatgtcgcaccttttgcgtatcccacgctttgagatatgactggatgctctctgcatctctaacaacgtggataacaggatgcgtctgcgcatattccctaagaagtcgttggccattgcgttccatcgacccggccccgcacgcaatcacacacccatcctggttgtctgctagcatcgactcaaagacccgggcctcttgtagtcggtaaacagatccatcattttccttcttaaactcagcacgggaacatcccacagtctgatgaaaatagcggtctgcatcaatcaatcgtcgaccggatgtcgccgcgagaatgaccgccagacttgactttcccgtgccacggattccgatcaacacgacagatgccttcggactgaaggtccgtggggtctgaagatggccctgttcaaacagtattggagatccgcggttggagttcaattctttgagcgacggtggatgcgaatatccggatgcttgtgtgcgttcactcgatggacgtgaaggtggttgagatgaggggagaatagtgtgagggggcacgacgcctgggctatactttcgaggcccatcatctaaagtctcgacttcgtggagctttcgtttcggtgggcgtaccaacatggacatggcgcatagagtgttccacgtgcggcaatgaaatcaggagcaggctagttgaggacccattaccacagagggaaaggtgggggccacggtagggtattgagatatgtgtatagaggatccggagatgtggagggaacgaaccaatatggtaagcgggattttccaaggtttgcgggggaaaaggatattcgtgaaaaaggcgtgggtctgggtgcccccgggccatacgctaccgttacataaggcggacgagcactcacccggccatcccatatcagattttgcctgcagtatgattcgtaatataggtattttatacatttgaatacatagagttatacatcgaaaagtccttcatgtctgaattctctactccgtacattgattctcaatgaatataactctttctccatctagctattcactagataagtttccggtttataatgaaaatatagagtactaattgtctaggtaatttgacggtaatgaggcagtaatgaaaagctggcggtgagtcaggcggtcaatatctactagtataggaaaatctgatatggcggttaaagattgccgtaacccggggactttcgattttcctcttccccgcgggggacttgcgctcagatacgaacatgcgaaacaactggggaaatcatcgaaatttctgaagtttggtctgaattgcgcccctagcttacccaaaaaatcagcttcaaattcatagcttaaagctcagtctgcacgcgattaccttttgcgagacagtgactggctcaccggtagccgggtatcgacccttccccggaagaaccttgttagcaagcgtcttgttttgtgctgcacctaacctcaacatcgcgcttcccccaacagccctgatatatttccagtgcagctcattttcatggcgtaatcgcctgatcgtccgtgcaggcgcctgtcggcaaaggattcgtcacatatcacttggggggaacatgcacccgaatcctccaagtggatcgcaaaatcaactaccatgagcgccgaacagcggcaagctaccggctctagcagcaagtccaaacgacgatggcccgagccagaagatgacgggaaggcgacaggggaaccgaaacgtcagcgtgtttcacgggcttgcgatagctgccggtcgaaaaaggacaaatgcgacggaaaacagccagtttgctcgacttgcgcatcgctctgccgaccgtgtacttataaagccaacccaaagaagcgaggcctgcccactggctacattcgctcgctggagttactttgggggctggtattccaaaggatccaaggcagtgaagatgtcatgcgagctttgatgcgatcaatcaatcttccaagtcacttggccacgatgggcaaggaaacggaggggtccgatgcattgctagcttccttcaaaaacagcacagtactcagagatattgagcgcattcttatagcactagaacagccggaggaggaaagagagcgaaatatccagggatgtggcgatggagagacacctctcgatgtcgacggaattctttcgtccgccgaagcacaggaatggcagatcccagaaggcatggaagctcgcgagacgccattaccagggatatcgccgactcgaaccgcaggaggcatcgctcctacgaaagtcaccggaccacgcccgactacagactgtggtattcagacaagtgcaccagattaccgaccctcgtcctctttcatctcctcgccgaatcctcattaccctcgatcgctctccatgaaaacccctcttcaactcccctataacgcatggccactttttgatgtatatttctcctacacgcagtgttggttccccatactcgaaaagcatgacatacttcgtaccgcttttcaatataccgaaggcgatgtatacgcatcgtgtttaacccccgggtctggggaacacgcggccttatgggctgttctcgctctcgcctcgctccaggatgcttctatctcagcttccggtgaagctgaagagcaccctactgatcatatgactccatcacgaatgtataagactgcccggcaattgattccgcctgaaagtggccctcacgaaatcggacatgtgcaagcactgttgatcctgggtctggtcaagtttggacagcaagaatggactgggtcatggatgcttgtcggtcaggctgttcggattgcgcatatactaggtcttgatcaaccttcgttttctccatcatcgaggactccggatcaagaaaaacagcttggtcgagcaaaacatgtgtttttgggttgctttgttctcgagactctcattgcggaatcaatttcacaaagcccatcgctgcgaaaggcagacctagccagggtaggcgctatcaatgaagatggtcttgaggaatggcatccttgggaggatcaaactgggttacggcccacccaatcatcacgggcatctatgcagcgtggtccccttcacgcgttgagtactttcaaccgcctcgtcggcctcgtatccattttgaatgatctatgctgttgcaagcacgacccaacgatatctcgatcacagctggagcaactggagttgcaattacagcgatgggtaacagaattaccaaagagttatcgtgtcgatctacaaagtcgccctgtgagactggcttctccacatatttttgggttagagatgacatatgaaagtgttgtcattgctctcagctctcaaattgccattcgtgaatatgatcagaacatacccgaaccccctcacaaaattcgtgctacggaaagctcgaaaaaacttttgcaattgcttcaggcatatgtggagacatatagcttttcagccacagcaccaacctttggtttgatgcttcgatttggccttccacggtccatctctagggatctcccatcagttcttgacatggggttacgaaccaacatatacaatctctcttcgcagctttctgtattgtggactatgccagaccagcaaaccgctagtcaaggtatatcacaaagatctcaacacctaggtacttctcctgcggtctcacagcatattggtgcctctaccggcggagatttagaaatcccgttatcgctctcaatggccacaccttcacatcatcttcgtgcaacacatgcgtctcaaaataatgctcatgccgcggctgcccctgagaacccattcctccccacgccttggctcagagccacacaacacatcgaagatgtatctctcctccgcacaccgtcctctctaacctccgtcgggggcgcctctgaacttcccccacaacagagccacttggatgattctcttaacattgggctttctcatcctacatcagcgcctagccaatcccacagtaccgggatgctcgccgagatttcgccatcgtatcaccagaccgcacactaccacccaacggcatatcacgactcatccgtcaatatgagcacatttgttgatatggatggctatgcgcgtccacggaggcagcggattgctcctgatctcgatgcattatttgacgagctggcgtcattagatggtgcagaaaagtatgcatttatcccctatttctttggcataatcactgactttaaccctctgtagagccgacaatcaaccagagttcatgcagaacctaggttttgtttctaatgcgggcattcctgagctctactcgttctccagtcagatcgagcctttcttactggcagagacccagcagctacccaacaatggcaatacctctagtatacgacaagaagcgcagcttcttaatatgtcgggaacccccaagcgatgacgtgatgtggaatcactccattctaatgatctggatgccgtgggaacaccctgtcgccgctggtcggcctcgttggcctctgagtctgctattcatatgggactctggactagagctatacatctagttgttggctcgcatattatatcacacattcgaagcctcaaaggggagtctcaatttgtgtctgtgtgtgttgtgtaatgcgcggcgcatctctacaatatacaaagctattccaggctaggcaactggtaataaaagatatcctctatgacacatatgaaatcactagtctacaaattcatttctcggaaggatgagcgcctttacaagaggacttctacatgaatccataaaagtttcccacaaaaaaaaaagagtatatacagtcacatatcccaactcaatcatagcgcagccttagcctccttttccttctcctcgaaattagcacaaacatgctcaactgcaaccttatacccgtataccccaagaccaacaataatgcccgcagccttatcactgaagtacgaatgatgtctccagggctcgcgcgcatggacattgctcacatggagctcaataaaagggatactgacaccgagcaaggcatcgcggatcgcaacggaggtatgcgtgtatgcgcctgggttgatgatgataccgtcgaccttgccacgcgccgcctgaatgcggtccacgatggcgccttcgtggttcgactggaagctttcgagaacagcaccatggctggcggcgacctcgcgactgtttgactctatgtcggagagcgttgtgtgtccgtaaatgtgtggctcgcgtgtacccaggaggttcaggttagggccgttgattaggaggatggatttacccattttgagtggtttgatatccgaattgagggattcgatggtatttgggggattgtgaaattgagagactggatatttcaagggttataagattgaaggtaagcaggttatcggatatattcatgttatactcgtctctccgcattttgcccggcccggcagagcgctttgccgtggatgattttttggggtcaactaaatctttcaaatgtctaaaattaatacagaacttttactaggactattagggtaaaattcaattaattctttatctgactagagggaacctggaagtcgctgagagaacagcagtagaggggacaacaaaccggagattgagagaaggcatgataccggtttgtataacttatgtttgcttccacatgtttaagagggagatgcacgatgggtagtatggcatagcaaacaagacgagagcaacctataacaccacctaccaagtaggccagctagcaagcatgggactaaaaaacatcctttaattcagttcttgtgcgccgtcgagtctccctaacatgacaaaccagggcaacatgatggtccgagttcccttactagttacaataactaggaaattgtaattattatttacactatcataggctgagaccgagctcatcttcaagacacgtatggagtgagaaacttcgtgctcacagcatccggaagactatatgtaggcacaactttcaagaccagtgaactgcctttgacgtaattttattcaaaaaataggaaaacctagggaaagacagaaattacggtaaaaaagaaactatattaacctggaaacaccccagctatgacgttgttgaaagacaacacacaagaccacgagggaaaatggtcaccacaatgcaaaaaaagagaaaccaccatctatatcaacagttaccaagacttttgctccgatcctgtactgcaatcggaagttgagtgttcctcttttatctatctctctattttctcttgggttggacctcttggcccaacctcgtctgtggtcgtccaggaccacaactttgattatttttcatcggttagattcggtttcgacgtaggctgactccggggatattgttgaatttctggagtgccatgttgagtgtttcttgcaattgcaagaatgaggtaaaggggtaggtgggattgtgtcaggatcatgaaaaaatcatggcgctgacagtgttcgggaatgaagcgccgaaaaatgccgtttcatgaggggattggaatccaaacggggggactgcgaatggctttacgcctccgacgcccagcgggactcgcgcagcggcatctcctcgccagcttgcttgcggcttccgtctacctcgcgcttccacgcgtagtactcgccgagacgggtctcagcgtagctggcgtaatcgaaatcgatttgggagatttgcgcctggatgagtgcccaaacacccctaggagatatgattagcatgatatcaccattatgctgatctttcaattttgttcgctgaactcaccagtaaagaccgggaatgccacggaagcggtcaacatcctcgtacagccggtcgacaatctcagcctgggacgaagcgtcaagaccgcgttgttcacagtagctctgcgtgtactcagtaaggaactgacggcgcacagactttgtcggcatcatgttgtaatcgcagtcgtagccaccccactcagcaaggtggttcgatatatcgaaggccgcgggtgcaggaaccgcatattcataatcgatgaaattgacaggcgcgacaccgtcttcgggggttgggacaccgttctcgcttggaaggacaatgacgttggcgcagaggagatcgcagtgcgagaagacgagctataaacccagcgattagccatttattcaacaaagcaatccccgttaccagcaaattcaggctaggagccacataccccgtcttcaccaatccccttcccgtcgtccagcatatccaaaacccactgcagctcggcttgcaggctcaaccggcgagcacgctgctcgggtgtggtcactggcaaagccagcacccacttttgcagcacagcccacatagatgggcccgcgcgtcggggcttgattacagtgatctcatcgtcctgggagttcgcaatctcagccacgggagcgtccttgtcaggcacggctgcgctactaggaaggacggcgtgccattgcgccaagcggcgagcgacaccgcgccagatgggcggggaaactagatcttggtggttgcagggtctgccgcggatgaagcggtagagcaggccgtttttgaatcgagcgaggaggggcggggccaggccacggttggccaagagtgcgtgggacttggtttctcctaagaataattgatctacttcagcatatgtcgcaatgggcaagagaggcgcggaggggctttgttttgttggagaagtgggaatcttgacgaagattgtccgtcggggggattttgctcgtactttcgcgatctatgaggatctctgtgccatttccgtacgccctcatcagtactgcctcattgtctatttgttcctccgtcaggccgggtttcaggttgataattttcaagagctaggggctgttagtctcggtttaattccgaaaagcttattgctggtctcatgggaagcaatactgggaaagagggacacacggtgttggtgatgccgtcggtgaaccgcacgaactcaatgttgttgtcaggaccctcccagtcggggttgagggtcagaattagcctgagagcagatgcctgggagtcctcatgactgtatgataggggaatgtatcggaattctggcgtgggcgcctgagtgtatgtcgagcccatgttggggttgggtggagcggaggtagaaaaggggtattggcgcaagtcggtttgtgtgccaggaagattttgtgctatttgattagttcacaactgcttgacaggcacccctatatcagtgacgaggtcctcgaattcaagatttaggtaattgcacgaggccaggctgctagcgcagggtgcgaatggcgataaattctagaacgaagtaaagcacaatgtggaaaggcggattctgtattatggcgaaggtacaaaagattcaggggcgaagaatttgaagacgctatcgatggcggggaggtcaatgaaacaacgaggggaggtctcgtgctcccgacccgtgattggaagatgggacgattttctggggcctagggtacattcttgagggcaaaagggacttgtccgccgccactataactggtagtatatggatgtaataagttgtggttctttgaagatataagcctattggatacctataaaatgatttcttcatctcatgctatttgtttcaaccgcaattgcatggcgaagtcgtactaaaacatcttgattgcgcgaagtatgtacgatgtacattgctttcggcaggtccaagtcacggggcaatcacatgaaagacagccttgaagacaaaaagagggtctatggtcacatgcacgggccaagccctgagcttagccctacttacctaatccaacaaaatccctcaacaaaaaaagcgaaattagtcataaaatccagtattagtcaacgaaatggaaaaacccttccaccgaagcccaatccgctctagcgtatattgacttccagacacataaataggacctcctcgcccgcccctttactctttttttcttttctctccatcatcagtagaggtttacataacttaatgtaaatttcaacggggctccacaatgtggcttgctgagggttatcctatggtttcggccatcatgggttttcttccgttcccggccctggagagtaaaggcgtctctctttttcccaatcactttatggctatgctagggtatccttcgggaagccccatgggtgctagctgtggagagggcgtcacataccattttttcagtcactttgatgtgttctggaggttttgcttgctctgatcttcgaatttgatcagaggttgcagcgagcgtagtagcgttggatactgcgattttcagctggctcggtacacggtttaaatgttgtaaaaattatctacaactcatcctacaaagagcatcagaaacttccctaggctttatgatctcttgcgatgctgtatctcgccaagacgagaccataatgttctggtctttcttgccaagagatatcgttgatgtcggcatgccgaggccttaaggtatatgacccaaactaagtcactatatgtactactcttcaccgctgaagccgaaatcttcattgtcatcaccgtcataacttttagaattttctatcgtgtattttttcacatgtcaccaatcatgcatgcccagcattgccaatctgaatgcgctgtccggtccatttgtcgtcactgcgcaacaccggccagctagtaccatcggccttgatcaggctcaaatctagcttagtgcccagtacgcggaaagttgacttctccgggtcaattggcgcaaagagagtatatgtatcctggtagcgcttgttgtccgtggtgggaaggtcgaaactaatcgagttggtagcaaactcaaccttggcccgttgcttgtcaatcttcttgagatagagggagacgttcacggcggtgggagtctggtagaaatcgttcctgtaaaatgcgaaagtttgtcagtttgctgttttcaaaccagaatagcagagctagtctgcccgtatacgcacctgactgtgtccactttctcctcgcccgggggcttggccttgccaacaaacatgtgcctcgtcttctctgtgcagccggggatcttcagaaactcgtcgaactcgagcacccggcgtttgcagcaggaccaccccttactgccctcgtggaagaccggctggcccgggtggtggacgcacttctcctcatcacgagcagtcgacccagtataggacgcaccacaacccctccgacggcatgttgcgttggcggggacctccgcatcaggatcatcagactcgggctcctcgatgactggcttctcgggcggtgccgcagtagcgatagttggggtagcggagattggtagtcgctcggacttcttctgctccgccggtgtaggagcaatgacttcctcggccttggagggttcaggcacaggtgtgtcatcgacggtggaatgcttgccggtagtgcatggcgggatagagaggaattcctcaaaggtcaagacgcggggcttgcagcatttccagcctgagaagttagcggtgtcgcggggtagaaatgtagcagaagccagcggcaagatcaggtatcacattgcgctgccacaatggcccaccatgaaccgttggtggacttatgggatacagatctggcatagcttgaacaccaaggtacttacctttctgcccttcgtggaacactgggggacccggatgatacacgcagtcttcttccgggtcggtgaaggcctttccgcacgctttgtggacgcacttgcctgccatgatgtgtagcaagacaaattataaggaaattgacgggactgagtcgagagaagagattggaaagtgttctggagagttggaatggcgcaggttgcctaacagggtttagcggggaagctcgaatgttccatcgcggagaactctctgaccgcgttcgcatcacggcaccaccggccatctcgaaacaccgtggttgaattcatttcttgcataatcgagattttctctccatgtttcctacgcatttacttctcaattcagcccgcttgacgctgtttacacgtgcgggctgcggcctatgcgataccgccaaaaataccgtgcttcagctccagaaacggcgcccctttgaatacgtcgaagcggacatcatggagcccgggaataaatcttggaaggatgtttacgagtttgatgttccagtcctccacgtccagtcagttcacaatggcttgcccaaggaggccaatctctccgacgcgcgcaaattgttccatcgatggacagagcaagaagtcgaacgatcggtagatgaagccgagaagacacagtcttgatgattttacttggtgatttgtccaactgtaccgatttgccatgatccaccggcgggaactgcgcataccggggcatcgacatcgtgatatctcacccgcaatgcacgtcgcgcttgttgtattatatctgtctactcgcttctccagtcctgctggccagacctatcttgccacgcacatcccataagggggtgtatttctgtatgtattcgatctatctttgaccgtcaggtggatgatgacagatctacctaaataccctatcattgtacaatatactccgtatgtagtccctatttaaccaggatgtcttgattgtcaaataatacttgctctataattacaattgggtttcccacacaaatgcctcaatactccgaactcgtggcatacctatctagtatgtcacagctcagtcattttatctcgtctcaaactacccaagtggactgataattattatatgcacacgtttacaatttccttttgtacatatacgtagatagggctattatcgagggcatccaaggtcaagtataagtagtacatatagtacggagtaaatcgatatggctaggcggtaaggaaatagccacccttggttaactaactcctaatgtactcagtacggagtagagtagccctttccagatatcatcgtcactatgcaagaagatgcggcatatcattcagggtctctgatttgatgcggtgaggttggactgaatcttggactcttgtttcaccttcaatttctcgtcgaaatccgagtttcacaacaatctgacattgtgaccctcacggttctgccacgcgactctacgcgttcccatcatttattcctcggcaaatcattccagaacaagatatttttgaattccgtagtaagcggttctcaaatccgatctgtggtgctggcgtaacatctctcgcgcgcacagtgcaaataattgttctcgcttcactgtgacgcatgtacttcgcgaaccaaccaacaaccatcatcttcatcatattcagttccacttgatcggttgaaaaagttcagttattgatattggtgagtgtttttcttgaataaaaggctctttgtttgtggctttatgaggactacagtcaactcagaactatgatcccaactccgagaaacgcagactaatactctcacattcatcaatctaattctttactcatttgattaggtagctgaagccgataatgcctgatcaaacgccaatggcgaatggcgccgacatttcgcggccaccatcggcttcatcatcaaggacttcttctgtacagtcaatccaccctctaagatttaattgtacgagatgtaaggcaaaacacaggcgctgtgaccgaaatagaccaggtaagtaccccttgacttgatagggcaacacaattgcaggtgcattgatgactgactatttgcatagtctgcaacacctgtcggaccttgggccttgaagctgaatgcttatatccttctgcggccttagcggggtatgtctgtccgtgatatcagcttggccgagtcaaaatgactaacttatatcatctagtgccgagaacataatcaccaagaaaactggtactccattctcagggccaatgttcaataatgattatgctttacctgctttacccacaacaggtgacaaaagaccaagagctgcagacagttcttctggacgaattgaacctgtcaatgacgtggttggattacccatccaaaattctttcagccacacccggcagacgcagatactccagcagcctgctgcaaagcggtacaagatatccgaacttagccctgcaactggaaaagccacaagcacacctgcatttgaacgaggtcaaattgcaccatttggcatactcagtgggagcacactggatcctccaccgcgtatgcgtagtatatctcctactctgcctcaagacgaaatggagctcaggtgcaacttgaccaccgaaatcaatgtccagagaatgaaggaacaccgtcttacagcagggcatttgcgtaacatcatcaagctactcacgaaagccaagaccgaacgcccaaccactgaacccacgattgccggatcgagtgctatactgtttgacgagtatcgtgaggaagatgatctcatgaggtttgcaataatcaagctgaaaaggggtggccaatgctctcgtgctcttctcagtcgatttgagaatttcgtatatggcccattgatgagtcccgaggagaagaagatgcaagagcgtgtcatatgcgttgaagagtgcctgtcaactaactcggcgtcactgacagtcgatcataccgacctgttcctcctccgccttaaaagaatcatacttcatcctgatgtctatggcttagacgagaatgacccacgcatcgccttcctgcgagacgagctccttacagccatggcgactgactcgaagctgagtcgtccaatccgtaggaaattcgcggaacttttagacccagatggagagattgccggtatcagcgtagacaatccaggcatcgaaaaagaaagcccagagtcgaggaaggtgctacccaagcctacttcttcacgcgtgccttcctcgcacgcgccagaaacaccatcgagaacaataacaacaagcaaacaaaactctgtcactgctctgtctccttcaccgagccatccctctcttttccccccactctctctttcaacaacccatcctccccctgtctcctctcctatttcatctttatccccaccacctctggaaacgattgatttgaccaatgataccatgtcgtcgtcatttcccttcatcgtgaagcgtacgcctaagaagcgtattgactctggcagccagtcgtcgcaatccaacagcactgcagcgtcgcctttcgtagagccagcttccaagaaacgtcctgcttctggcgcgcagtcgtcggacctcgacaatgttatcgctccgtctcagaggcgttctgctcctagcagccagttgttcaactccgacttcccaaaaaggctctggagtatcttccttggaaaacaggcttttttcttgccaattcttgatctcgaccaactgaaaatcgcttttaacctggccgtaaaccgtgggaaaattgaccccacagtcattgacccaactctcgggctttgtattgcaattgcctgccacctggctccttatcagaaccttggggaagcccgcaagtggttcgatgcagctttatctaacatggctgacccaatcaaatctcgaccttcacttcaatctttccaccaccaaattctccaggttcactatctccatatggtcgggcacttgcgaatggcttgggacatcttatctatggctataggcagagcgcaatctcttcggatgcaaactatgcatggtggatgtctcgccgtggacgaaaagtcgttggagcaggttcggctggtatggcagtgtctctggacgaagaaactattcctcactctccagtttggcgtggtcgatcaatccctcgacagcttttacgacccacccatgccgatgcagtcgcatattactgacaacatgggagtatctggcaaccaaaccatcgaacaatcctatacgacgtcttcttttttcattgcttctgcttcccttattaagtgcactgacgatttgatcaccgttgaaaatgatctacgtgtgactcgcatggaatgtccgatcaaatggctttctattgtagacctacgtggcttccaaggactgaatgagagactctcgagctggaagaacggtctgcccaactgcctggaatggagaggccctgacatcgaatgtgctatgcagaaagaccttcttattcgccgcatgtccctcctggctcatgtgcgatttgtctatttccgacttcgtcaataccggccgttcttcattttgagccttcgactttcccaaacgtgcgcctgtgaaacgagccctcatatcactggcaaggatatcgattcggtggatgcgtctcctgtgctcggcctagtgtattacagtgctgtcaaatgtttgagtgctgcccaagacattgtgaaaactttatctgtatccttcaccaccacagcagatgagtatgctaagtgtgagcagcttgaatatctctacgctgctgccctcattttgattgctgcccggacagttccgcttgtcttgaacggtaccccgcggggtatatctgctgtatctgctgctgccaccacggcgaagtccttcacagcgatgaccgaggagctaaagaaaattgacgtcttgttgcgcaactaccaagagagttgtaaacaagccccaaaattcgaacagagaatcgcacgttcgcgtgatgttctcgaccagatcaaactacagtcagagtcatctaatggcatagtcactgacagcgacatcaggcttgagccagttatctggaaccggatctatgatagactcggcctcaatgttccattccagcgattctcagaacctcattgccccgctggctctgcgatttcaggccgtagaaaaacactcgcttggctggaaagtctcccagtggatatagaccttgaaaattagggtcctttctgtcgttgatacagctgcgctgaagcgctggcaatttcactgttctgtagggaggaatttacccgtggatcctttcatttttagctttgaaaaatgaaatccctttctaaatggttctttcgatatgtagatatgtggtatctggttagtggttgcgcttgatcgtggcagtctaagttgtaatggtcaaggcttcgctagagttgaataggagatccaagaggtacaggactggctagggacatggtgcgtggccttatatagcaaaccagcggaaaataataatgatcctacgtggggggattgaaccctggctggttatggactgatgtgtcccaattaggaaagggtgctatataggtcacattaaagatgtactgttacttccaaacccaccccgattagctcagtagatgggggctctgaagttctcgcttgggatgctgagagtgtatatcttcaattggtttcggacttcatgaccccggggcacagttaagatcaggctgcacctcctaaggctgaacgagagaggatggaatgtgtcgccacacctgcagggtaattgaccggggccgaagtccgaagggggtgtgcggtcccaacggatggaagttcgtgggtttggaagccctcttttctttttctatattgacattacttttcaacgactcacctagtgttttgtcctataacttctcgcttgcaaccagccacacggtacacaccctcgttgctgtgttctactcgagcctccaattatccgttgcatgctgtcacatctgacttgtaaatcgccacggaagaatgagaagagaccttgaggtcccgagacggtcgccaacttattcaccgaggattgactccctcattcctgtatatttctcgttcgacatctcattactccccccgccaggcaatttgggccatcacagcatttccccttcgctcagaatgtgttctccatacaccaaccaggctaacaacttcgttcctcgcatggcacagaatggtcatttgaaatcaagtacaagctattcatcaccatctatcgcagataccctccgctgtggacctatacctgaggagcggtggtgtcatcgacgttcagctaagaaagtcagtctacaggggaaggccattggtatggacggcgaaggtgagactcttacttctatcaatgacttaagatacccggctaagacaaatgacacagagcatgctgaactcgttcacggaaatacagagaaagcgggtgcttgcaacgtatctttcaccgaagtctcgatcacgtttatccctctaccagactctagcaccgactgcacaatcagcaactgcgtgttaaaccctgttcctacacctgacaagcaatcttatgttcagctagatatcccgcttgctgagacccggatgtcgtgttgctatcagtgatatactggctcgaaaggaactcatccaagaggtggtcaacagtctctgccacgcatactttgagatatactgtcaagacttcaagtagtacttgattatacaccctgcatccctccggcggactgtttccttgtgtaaaatcacgctacattcgaaagtacatggaatccaattccatgcctttgatatttcattggaccaccaattgacaagcgcaagagcacggagttgggtttcctattgattggtgagttttcaagctactagccaatgagcccgtgatcttaaaatcgatagaatctgaaggctgtgcatgatattttcatctgtaggcatactgccgatactatattggattcactgtcgtcaatgctcctaggaggtgcgctatctctccaaacaatcattgatagtatatattaatcattccaactaactcgtctagctatcaatttgacagcatataccaatcctaacagcacaggaacctcgatcagaggcccaacagtcgcagcaagagcctggttactatccgcaccaaacatcgccactgcaacagcaatggccaattcaaaattgttgctagcagccgtgaagctctgcacagtcgccagcctgtatccgaatcccaatttatatgcaacaagaagggtcacaaagaagattatcaggaaataaacgataagtggtgctgcaactcggaccacggatacaatttggtggaccacatggcggccttgcgaggcgaacaagacaaggatggtgaatagcaggccgatgagagaccagggactgatccatttgaggaaggtttcatcgtaccatttggcagaaattcgtcggagcacgaaccgcgtgacgattgcggcccctagaggtattccgagaaacaccgcaacacttttagcagccgttgaatattcgaatgtgactggatcgccactgatgacgctgatgaagaacacccccattggagcgaaaagaaccatttgcagcactgagttgagagcgacgaggatggcacaatattcgctatcgcctccggctagccctgtccaaactagtacctggaagaagctagcggttagcattgtctcgtttccaagagccgtttgagtggtgtcgacttgccatagcaatgcatcgtgccaatccaacaatgatcagcccctgtcgcaattctggctcgtcgggcaaaaaagcccaagccaaggccaactagtggaaccaagtcagtgagaaactccgtgtcatggaagtgttgggatcacggaccataagaaaaggggcaataatccagttcagaaaaatactgaaggcgatctggatccaaatatctttcgctcgcaaaacatgatgcagggattcaaaccgaatcttgcacaagatagggtacatcatgaccagaagacccacagctagaaatacatattcagttagcgaaaactacaaaatcattgctggtttcttgtgcgtaccaatggggacagagactcccacaaatttccccctttgtagggcaggtcctgtgcttgggacaaagttgcccaggatgattccaattgccatggcaagaaaaatccatattgccaagaatcggtcaaggataccgagacttgagaacatggattctttcttctgtggctcatctggagaagaggtctcccgttgcttttcaatgtcgcatgtctttatttggtcgttgggaggactggacgtacatgtctgtggtcgtattgatgtcatggcgagtgaccaagtttgttcggttaatggttgatagaagatatagtggtcggatttgaagatgtagcatggaatttttgtattcgtctagatgtgtccatgaatatttatatttgtataggtctagatggtagtggtatgtcactgacgggcgctgattggctgaagtgccaagccgaggccaaccaatcagactttggtagtgacattcctcataggcggcggggtatccggggtattctggctgcagagccaaccgcctgagtgtcaaatctctcaaacctcaagctcggaatttatcttgacataatgtcagccgagcttccatggcatgctgcatatcccgcaccaaggggcgcggcaccctccatatcacgagaagagctattgcaatggatccgagagggtaaacaagcaggcaaagactttgtacttgttgacttgcgtcgcacggactatgaggtacgaactgttcgaaaaaagcgacatcttcatgcgctgatttatcaaaagggagggacgatccaagggtctttgaacttgccagctcagagtttataccccacgatcccaacattatattctcttgtgtcgaacagcagcgtgaaatatgtgatttggtattgtggtgagctttacttgatacatatgatagcgatatcttgaaacgcgaatactgatctgcattcagggtcatctgggggtcgaggtactcgtgcagccggctggtttgcggattaccttgaagatcaacacgataaagagatcaagagcttggttctcacggggggcatcaagggatgggcagcggctggtccggagtatacatccttgatgaatgggtatgatgcctctgtttggacaaagtagaagcactcattaaatgacatgatgtttgtcaagtttccatcttataaggggtctcgtaacttgaagagccgttttaccaagaagatttcttcggatattagttatgtgctcgaccacatcgtccgattaggtaaacttcttcggtgttatctcttcggcgggtgtggtcggtgggatgtgatatacatgcctcgtctcgaagtagatatacatgtatggtagccgttggttgagacatggtcccacgatccaattggatttagcattgtgcataatgtgcaagtcaccttacaatgcaaggtgtgttaaagagagtataattaaacttggattaacctagcgaggcccgccatatccaaacagtctcagaaagatcctcaatacaaatttccccgggcagtattcttttatgcagattctcaagctaaatgggtatatttggagctattgacgcccaggcacacatttactcatttctccaaccccctccaccagtgcgctctgtgaagttgctcttcaatatgtcagtaacattaccgaggcaagacataatgaataccaagggtacgcggactagatacctgtgttcaaccttattcaattattggcgagatgagggtgcgaatgtgtttcagagaggttcttatcaagggatgcacgtcgcgtttcttgttcttcggttgtaggctcaaccggacttggagcagcgacctcgctcaaagcgccatattcatctctatcatcatccccagtatctgtctgtggcttgctttctggtttggaacctgaatctttcttacggccacaggtgaatattcgctggagtttggaaagcgtcatattatccaataaatgagatcaaggcgaaagatgctgtacaatgtaagaggagggtttccaatagaccggcaaccaagacccaggagactataaatgattggccactttgctacgtcatgactatgaaggggtgggcagattatcggatacgtttccgagttggcccgagtgttaattgggctgaaattgtgtcgatgatcttcagattcgaaatgaggaggttcatcgtgtagtccgtatgtcgttgcgattatctcggacctaacgtgccgttgttcctaactccgaccttggcattcttgtctcaaccttccgccttgtgacttcactccctcaactatagttactttcgaagatgactctccaaattgatcaaccgcctcttgagcaaataagttcagaagattcgatggacatgttggatcctctggctcgaagacgactacaaaatcgcctcaatcaacgtgcgagcagtaagtggcacttttatttgccacccggcattaactgtgcagactaacaccatacacaggaaaaaggaaggcgttagagtataaagagaaaagcaatacggcagaaaggaaatgggttctctatatcgatgattcgaacatctcaaaaaagaatgcatccacagaagaaggaacaagctatcaagttactcaatcatcgccacctcgccaaaccgaagtctctttttgttccctgagccctgcccagcatgctgcgcttatgaacaaattccgtgcaaaagctttgcatatgattgagaacccgaccctcctgcgaaatcccacctttagcatcacccagtacaatatacttcgagctatgttcatcaacgccgatctcatgggcctcacattagagcttctgaatgaagacctcgcgtcgcagttcaatctcaccggtccattaatgtcagcgctacatctcccagcaagcttgtgcccatctcagaaacaaaagaaaatcatccaccacccctggatcgacttgattccaatggtatctctacgggaggccattttgactagggcagatgtaattgacgaagatgaactgtgcggcgatttttacggatcttctccttcccaagaagtcgggcttcgtgtttggggcgaagcttgggatccatctgcttatgagatctcggagacattgatcaggaaattcagttggatggtaaaggactgtcccgatatcatcaaatcttctaatcactggaggaaacagcgaggggaaaagcccatcaggttcaagatcaaatgatatttcaatgcatttataataaacacatcaaattcctttcaaatgtctattccttacagcgaaaacttctcctgggtcagtttttcgctgagttcccacaatttagtccaattgccttcgtcgctgaggtgcgcgtgcaattcgtcgtctgcgactgcgttccggttgatgtatgatccattgtagcctgggggcaggattagtcgaagacactataaaacgggttatgggaggtgttctgcttacctgcgatggtagggtcgagcattcctgtgatgaggccagcggctccctctgaggcagtggaccatgggggcacttcgaaaggctttccttcgatgtcgaccagggctaagagatcgtttagtgaggagcagaaaacattcaacaatagggcaatccatacatccagcctttttccattcttcgacctggtccaaaaagtcaggagggcagtgtcgttgcagaccggttagaacagctaaatgatggtcagctagatccacctaaatagtaagaaggagaaataagacataccaccagggtcaatactaaaaacgcggatcttctcgcccttcaacttctggcctagtcttttggcaaacatgactctcgcggcgttcgactgggcatacgcgaccgtagggtcatatgtccgaccatcctacaaggaaacggaatgtcaacgtggttgaatataacgggtaagtaaaacttacactaaagttgtagtcatcgaagttcatcttcccttgtttagccatgcccgaggtcatgataatcacagacgaatcgggccccgcagcacggatcttcggtaggagcaatttgacgagcaggaagttcgctagatagttgactccaaattggctctcaaatccatcctttgtcttggtgtaaggcgggaacattactccagccacgcatacaaggtgatcgatgtgaggcacatctgctaggtctccgacggcgtttcgcacggcggtcaagtcactcaggtccaggttgaggaagcgagtctccacgttcggcttggatgacttgattttctctctgatgcctgccacctttgattcagcacgggcactcaggatgagtagttttgggtcggcggtggaaagctggagcgcaagttctcctgcgatggagttgtcggaaacgccggtgatgagcactgtgatgaaggagcctctgtcagcgcttttttcttttttagatgaggggaatatttgattacctgtctttccggcaagtgccttgccatacttctcgaggacaacctcagagcggaggatttgctgtttgttggtcattttggatgaaggtgtttggaaataatgaactaagcaatggagaaagcaaagaagtcttgattgatatatcctccacttgactagacacaacagtccactttataccttttctttcggcgataatgggattaagtgtttttgaaaggcatcgctagtatagttcagatggaccaatcatgacccggggaaattcccactagaggtcatcccttgccgtatcgggttagcccaatgtcatcaagtatcagattgtttcttcaataattattcctaagcaattagaagatgatagaacgtaatggggatatactaaggacttaagatgaaatatccgttaactcctactacagtcttggctctatgcaggcgagattacatgttagaacatgttgaagtaggatattatgatacaattgcactttgataatcacaaaatagagtacagtaaactaactatagctgcacaatgtattccttttgagaacgagggaaccgaaatatgtctaaaccaagagaacataatcgatcaaacggataaagccacctatggtgcacatgtacgatctcccctcattgtacgacttgtagaaggattgccaatttagtcatgctattgaacaattagggagcaccaactcatattaaggaccacttaggggcaatagtcatagattgggctaagtacaagggtgaaatcactctgttgaacttccgttccttgccttctatcggcaatgactcggggctcaaacggagatgggttgcattgtagaaaacgccagtggcaatgattttagaaagaaacacaggctattgatctcatcgttgggtttttgggtgtaaatgggcaaattagaatgatatccttggaaaactcctcgcgaaaccatggaaagagccagagtggttgaacaatccgcgacagccgaaagatcggtgcgtggttcctgcaagacccgaagagcccttgctaataagaataagtatgtccttagcagagaaagatccccatttggcaatgagtatatcataacagactcccgtgacttgactagatagcccgatgcaacaacggacctgttgacggaagactagagacatagatttgggccaagacgagaaatggtaaatgtgattattagattcaaacaggaggctaatccagagccaccggcccgattgtctacacgtattcaatacaatgcgccaaaccaaataaaacaagaaaaggtcatcacacatatcagcgggcaggcatgaagtagcagtgccccaaaacagcctgctctagaaccacatgatgcctgcaacgagaccgatcacaacggccatacagcttccatggagctcatgtgagtgccgaccagcggcagcatcggtggaatcctcagcgccaactttttgttggggcggtgcttgctcagatgcggtgattaggtcttgatttgaggcggcagcgttgggaattgtggattcgggtattaataatttagaagcgccgttgatctgctccgcggggaatatcgatttcgcataatttgctccgtggagtccgacgcgctttccaaaatcaatggcgacatgacaggcctgctggaacatgtcgcggaatgaggcaggagatggcaacaatggcgtctgtatgctgtcggaggaattattatatgacaagatgtttggaagagattcgatgtcggatgcggttggtagggattcattgatggtgatggtagaatccggatgcgtcaagcccgtaactaggctgcggttggaaaatgaggcgaggaatgggtagtcgtctaattgctggatgaagtaggttctgaatgcgcgggctctgcgactgaatgaaaatgaggattcgcgggttgacgatgcaagtcgacttttatttgcgacagcggtcgtttcgctgggcgggaccacagcggcatttccaacccgcgcagtaacgggtgggcgattacctcgcgatcgatgtgacgcagcaagaacccatgatttgcgaggctcgttgagcggcggtgctttcggtgctaattcggtgacaccatcttgaaggagagggacatctagacagtcgacttggttagttgactcggatgagctgggtggcggaaagggggacatacggcgaactgcgccggtgtagaagctgaagtccgcaaacttcgagtggtagagactcggtagtgacggcaccaatgtgagaagcgaaaacacaatgaggatgaggagtggaagagcaccaggtttatccaagccagaccgcatcgtccctgctccctggctccgtccagaagcttcggagtggtgttttgaggttcagacttcacgggaatcgaggagaagcaagaatgacagtttcaaggccatggaggggacaagctcgggtgtttcgcggtttcaatgcaacgttccgtgagatgcagtgtttctgcagagcaacgcgccgacgcgcagggggggctggtctatctagaaggtggccggggacgagatttaggagcttgaggatagaaaagatgcgaggagggcacagatgcggtgggttcaggtggattcgacggggttaagagtcgaatgaagcacgataaggagccctcggggtaggtggatgcgcttccttggctcttctcttttttttttttcgcacagagccccgagtatgacgtcgatgaccgttttgtagaacaaaaacaacctggacttatttgaaatgtgccgtttgatctggagtgtataaaatccccctctgccgaaaacgtcgaggaatgtttcccacgttggccgcattttgacagtttgagggtttcccttccaacaatgtgggcctgaggcatcaccgtccctagcaacatgtcgatcaccaaagagaaaaacaggattctgcattaaagatcctggttgttcagtagttcatcgactattttatttattattcccgctttagccctcgtgcatagtgtgatgtgcgctaagtctattgctcgtggcaaccggtgagtaccgaatgtcgtgacggagaacttccagtactccaacgaaccatggctcctaaccagcatatatacatcactacctaggtatatgataagtatcggtgagctaacaacttcatatgtagccaaagctgctgaagaagtgggggttatttctggctatacataagtaccccgataggtagttagtcaatagcatagagcgcaaaacatgtcattccatcgtcacgtgaatgaaaatcatcacagcgtagcgcatatttacaggtctcaaaaagaaatgcataatgttatatacacatatgcttggtaaaagcgaaagccaagagaaaaaaataaaagaagcgaaacatgccaaagacaaggacaagaatcggagcatcatctcttctttaatcatgcacattcccgtctccattaaaacggattcatcatagaagcatcaggaccagccggccggctctctcccccacgagctccagaaacaggagtagatttcgtcaccggaactggcgaaacggtagtcggcacactcacatgactaggcgagcgactactgcgactgtgtgagccaccaccgcgggagacactgctcccgggagtgccggtactggaaccaggcttcccgccgcgtttgaccatcttccccagcacggtgacgatctctgcggcgtcttcgaagctttcgtcgtccatgccttcttgggaattgtagacgtccgcgatggcctgttttgcgaggcggcggcacgcgatagggtcttggaggcagtcgtatagataagctgcgtattccagcttgacggagagacgcagagggtgcgagcctggtaggagtttgtcggagagggttgctgcgtggttgaagcaggctgttgctgtggctgtgtagtctaatggggggaggaggaaggaggagatgggttggggtggctgaactggttgcagtactggaaggcctggaggacgggatgttggtgttgatgccgcattgattttggacttgtaggggtgggagacgccgagggcggttagggtatctgcgccgtatatggagtcatgtttgaaacgtgttggtatgtcggtgtcgggagtaaaaattgggcgactgtggaataggacgaagatatggtagaaggaagcgcggagtttgtaggcgagcactttcagctccacaaacctgtctaccatggggaggatgtagccctccagtattagtaggccttcacgggagagccatataatacgatggtacagctgaagggatcttgtttcacgtgttgtgtcgagtcgccgcagcttgcgggctctaagaagcttttttgatagcatgacggagactccgaggactttgtatagcattgccgagagcaagggattttcgaggtccatgacggccgcgaaattgcccagggccttctgatccacttcggaggaggccatccataaagcccacgacccggaaattaggaagtctgtatatatcgagtcagccatgttggtcatgagtctcaagcaacaggcgtaaaggttcggggaagaccaattggccgagactcaattgcgaggctagaaacccctcaacagataaatgaataggcaaagacaacgccaacttaccgaaaagcgcgcaaacagaatttcaaataaccaaacgcagcgactgaatcatgctccagccacgcgcgtatccccgagccgcggaccaattgatctacgagatcgatcttggcgtacaaaagtccaaactattccagcgatgcgccggagccacaatacggaatatccgaaaccaaaaacaccaagttccgcgcaagctgcaaggttcagctggaccgagggggcggcgattgttcagaccgcggagtatatcacagccaatggctttagtttctgggagcgggcaccaaatccaattgcgacaaccgagtatataatgtttgaattgtagtaggtagtgcggtccgcgcgatcaaatcaatatttcctgttttgatctagcgacggccgagttttgaatgtcgtattcacgcggtgtggtggctgggaatccggctagcaacgcaaggagcaggcaatgaggtgacggagctcgtggctggattggaagtagaaacgcatcgtgcggcggcaaagtagggggtagagtgggcgaatgcgacgattttcagtgccggcgaagtctgtgcggggaaggaattggggacttgtctcgggtatgaagctactagcccgggggctcgagctagaagtgctggggggttagtgttattattgtagatgttcgggctacctgtagggagtcaagcccgtggattaaaagagaattaggaattgaaagatattcgcagactgcaaaaatgcaaggtcatgctagctgcgtggtttcccctgatatgacgaagagatcgggttggactcgggataggtgtatggagtattgtatagtaatggttactagtctgtcttggagtcccacagtcagaacagaattgtacaaaattgtacagaattcattggcatagatgtgctacgagtggaggtaatggactatttgtataaagcagactcagtagggtgcaattgcagtgcccagtggcaacttctctcactctagtatattaaatgctgtgctgtcctgcactagtctgagtttcgtgatgtcaattgatcctgttaactccctagtaatgccaggtttgctacgtggcagcggctcaaggcgagagacaattagggcagcatcgcagattggctgggcactgcctggctaaataggtgcccaagtcctcgggccagattactttgaatgtacctgggcatggaaaccttagcacggactgccacgctggcagtggctgtgattgtgtgtattggtattattagtgtagttatgatagaaatccacctatctgatgtgatggaagtgagaattgtatgttatagtgttcattgtacaaccttggacatccattgatctacattcactatagaagaataatacatcgttgatatactacagctctgcaacttacgttgtgttctcaaattaccgtatctgagctgttacaccgccagaatgatgcccctgttgatcgcccaattagaccaatccattgtatataactgtacagtatgttgcagacaaattggtaatttaaggtctttttcatttgactgtaatttttacgcctgttttccatatccaacgacagccttgtacatagtagtctccactataagtctgagatgcaagctatgtatcgtgcatgcaagagtaaccaaagaaaaaaatgctaaaacaaaatcgccctattcatctaggtcatcaactgggaatccaacaaatgcgcgcctcaagaaaacccgccagatatcgttcgctggcttcttttgcttgctagccgactcagcgccttggctattggcatcgctggtgtgcttttcttcaactccttcctcggcaattctagctgcgagttggaagaagctgcgtactgtcaggtctttcatttgatacacgtcatcatttgtggtgtactcgatctcgtagtcaagacgatgatcgtggcctcgtgtgcctgccgcgatctgttcgtggatttttgttaggtttgagtaatattgagtgtagccaagcatcgtaaacgcctggttcgagtatgccgggccgggaggggcggttggcgatgggggttcggggactttgaaattgggtttctttttcttgtccttgccctttttcttcttcttctgaatttcgggtggtattacagagtcgtttctggtttccggtggatgaactgcagcatgatccagttcaaacgttgtatcgtcaacttcacgtccgaacaaatccacaccatgtgtgacatcgagtcccgtggtgttgtagtcgatcacgcgcagactggggaagaaattcgggaccaaactgggagacactagcgatacgctgtatcgttctgcccacgggcctccaatcttgtccaggaacttctgcttcttcttcttctttttacccttcttgtttgttccaacctccggggagatatctcccagatttgatatgaagtcaagctccttgaaaatgtccgacggaggagatggcaatgaggaccattggtttcggagtgactgaaggtagtcggtctttgagctgatcgacagcttcccgttgacatttgaatcaatgtcgaccttgttgctatcctggagcatgaagtggtcgatgttcatatggccgtaaaagctgccgacaacaatgtcacggtactggtgcatccagagcgtgtatttttgccagcatgtttcatcccagttctttttctcgctcgaccgggccggggggacatggcccatgaggatcgctttcatattgcgactgcgcaagattttcaactgcacccgcaaccactccatgtgctcgtatccaggttccgacttggcattgcatccatccactgcgctgttggaatcgaagaagtacatggtgtttaggctgatgaccgctagccgaccggggatcacttccgtggtgaaccaaccgccctcgacgaatgtgtgacgctgatcttctgggataaactggtcccatatctctgcaaatcgctttgtccacttgttcgggcccttgttgaagatgttgtggggcatgatatcgttattaccgaatgtcgggattacagggatcgacattttaggcacgccattcgaagtcccactaaccccttcctcaccgaaaatgctaatccatttttgcgacaggaaggcattcaaatccaggatctcatctgccgtgcgagggagcttctcgtcattgtcatgtcggacagaatcaccagtccaaatcacaaaatcaatctcatcttttaagttttcttcgatccagcgatatgtctcattcacaagcgataaagccgaatcgcaatctgtgccctcggctccaaaataccccgcggggcccttaccacggtggcacgagcgatcgatcgaggttccgggcttgtagaggcggtcgggatggaaatctgttggtcagcatgaggttacacaacagaaatatcaacatagagaactgtctcctaccagttatatgcaagaatcgtccgcgtacaggtttgcgcaaaccctccgccagctgcccactaggcagctccgttggactgagacggcccaacggctgttgtcccaaggggctggcggagatggcgtcggcaaagaggcccagcagcaagaaaattgactgcatgagtcctctacaccaactggtacaccaagagagaaatgtgggtgaagttcaggacctcggaatattttgggtaaagatcttatctgcacggtcacgtcactgggcgggcgcggtagccgaaccccaactcacacgcgtaaccaatcagaggccggtggtcaatttggggaggaatgtgaagagttgataaatggtctttactgcgaactcagtataaaattagaaagttagagttaatctgatatccaagacagccaatgacttcatcacgtgccaacggccttgaggggaccttgggagttcaggtagaaacttttcatggccagatccctcgctgtacataagaagtcctttctatctgattggtgcaaagtgataggcccgacgtgtctacttcgtactattattcccagtagtattcttcgttcacggtgtatgtgatgtacacgcgaccgtcttgtccgacaaagatctccccttctccaacgaagatcctttcctcgagtgtcatggccacgtaccgccaatcattggtctagaatcatccatcaactcagcgctatgtaggacatttcttacagatgctttcggcttgacgcgaaggaaaaacgggccgctgtagataccgaaagttagccgtgatcctcgatatatatgtaacatggaaagatatacagctgatggttccccttccaccttgtagcgtagcatgaatggcgtccgcagtgactgtcaaatgaccacggatgtaatgtgaatcaactaccgatatgtaaataggtgaacaggccaaatgatatttgttgaagttatggctcacgccgttgtctggagtcctggagatagaagcgatcagcgaaaggctggcgctccgggtcctcctaaacatgtgtactttaacatacatgagctggactgttgcgtcaaggaatgtctcctcattgagtacaacatgaacgtatgggctgtcgacattgatggcagttgcagtcacagtcgggacaaactcgggaaatgtctctatcctagctcgggtgccgggctattcagataggcaggaatgttagtaaaatgagggtcgttcgggatgagagatgcttggtgacttactactgcgacgaacccttcggaatattcagtgcccgctataaagcggcaaacccgtcagtgaatcagtgacattggacaaagtgctacagatatgacctaccaatttcgagttggccgagtatattcgcctgcatgattagtaaaggttatgattgcggatgatatgatggcgagagacttagaagtcgggaagaatggaaaaggaagaaagtaaaatgagaaaggacgagtggcagagggtagagagggaaagtgcacatccatccaacaagcagaaggtcgtctaaacaaacgcacatcccacggtcgccaaggatagacttttctgactttttgacatcggttcctctgtgaattaccgaggcttatacaagcatcatggtcttcactttacgtgatatataatgtgattaatccctacggttatggaaggcatatgatcccgaaccctagccacctaggcagtattatgagttatcttttaactttacataagaataatataaagccttagacagcctgagctatccaagtcattgtggtagtctcattgatagacgtacgtaggtagcatctatgcccagaagcaaaatggagttatcaacggatttcaaagatagagatcacttgcagctatgtactgatgtatatagcttcatagatgcgaccatatgcttgcgcctcctggctccagcttgacccagggcggccagaatggctatgttgcatgctttatgtatatttatggaagcaaaaaggattggccgagaaatcttccaggacacagaggacttacggccagctatatagtatagcttgatagaggacaaagagggttaccaaagaggaagtcgacaaagcgttcataaacagaaaaaggcataacaaactgcacctgtaagcagtaagcatgctagcgcgggatatgaaacaactcttagtagagtgcaagctatataggatgagcttcttgattgataacaagcataagaaacacataatattggtagtgtcgaagttgagtcttgtacatttgctgactcatatgaactgcccgggtggtctagtggtatgattcgcgcttagggttaacccaaagcattaatgcgcgaggtccccggttcgatcccgggctcgggcccattcttttttcttcttcttctttttaaattgaaggaatctaatatggaaatgctaaaagcgtcatgcgaaatgtcattttgattagatggcaagaatatgtgagggccgcaaaagttctgcagatcggccgatagaacgtacttgcccatattaaccacacccttgttttttttcgctaatttaggttgaagaacaataagtatacatagatcccgcacaaatatcctaaaatccgaaatcaatacaaaagagaagaggtaaaaaaaaaaaaaacaaggggcaaatccaaggatgaaaagagggagaaatcgataactaacgtccatgaaccgggcatacatgatgatgatgatcatgtcctggtccatagttttcctcacgcttatgttcataacaattcatataatgatcgaaagttccctctgcgagcagtcccctgcgctcaagtctaagcatcaggtaacaagcccatagttggcagctctgtagtggaacctctctagcctctgcttcgacagtatggatgttgtctcgatgaatttcaccgagcaagtgtgtggattcgaccgaccagctatcaaacctcttgttatattcgatctccaagttacgattccccatgtagccggtgctgtggagtcgagtgcaagactgagaatgtggatgcctcgtaacgagcatccaatggatgacacccccctgcggcttgcaaatttgaagatggagttcatagtgacgaccgtgatcgtgtcgtcggtcacgaggtgtgctgtgggcctgtgaacgtatagttggtcctcgactaggcatggttacaatatgaaaggttgctaggggctgatatctgtaaaaaggtgtgagtataacgagtatattgacgatttttttgagtggaaagattgtttgctgtgatgatcgagttaattctgagcaaggactcgatcgttcttatagatattcctcgagttcattgactcgtgggttatacaatgggctaataaaaatcctttattaaacacggattaacaaagtctttgttgcctggatgcctttacaaacaattaggctttattaatctaattgtctaacaaagactttctataatctcttccactagcctaagatagctagcgttatgtctcctatattagatgacatcgtgtcttctttgttaaaagggtaaagggttggaagaatattgttcatgtgtcatggaaacaagtaaaaatagccatcaatatacctaattcaagtcaagctttcaattcccagagcggggtaggtgaggctgagatgagatacgatgaccttcacggcttggcatcagatggatggctggtccttgaagggtttgtcgacagcattcctgattatgtcgtaggatctctctgtgcttgttcacatgatttatcttatggcaggtacatgcgctcttactgcattgaacttctgggtatctattatagcacttcgcataggatatttatacatagacatggaccgacttcttcgagtccctcatctcgtgtacttcgtcaaactcattattattcccctccaggatatcatccgtgctagaattatccggattaggtatcaacgactttggtgtcaacctccgagatctaggcgtgggcaaagagtttccaggatatgaggagctcaactcgtatgcgctccgtccacttccggttgttcctcggccggatcgtaatagggatctgatgcaaggtatcgatgccgttatgatgactatgtaggcttcgatgaatagccagcgatcgtagttgacggttgcgacagttgggtcgtcgtctgcgtgagcgaagacttgggtttgcactgctttcataacggaggctgccattgcactagatccaaaataactgcgttagccggtatatattttgaaatgaagtagggattagtggctcacaaaatgcccaatccgaggagtgtgaccaagcccaacttgacccttaacttcaaattcaagttccagaatacgtatgttgaaaaaactgccaggtaaaggtctgtggctgaattaaacgctgttgaagctgattattagtctcagatgtagaccagggcaatgaatggaagctcgtacagccctgataatacccgtagtatgcttggacgcggtaatcccagcatttgtctttcccattctgcgtccagatcgcagaaccatgtccagggcattggacaaatagaatgataatcaacatcacgttagtcacgatttgtaacccaactatgacccacagtatcactctgtgtgatctcctggtgcccagtagctgaatgacaaagacaatgaaggagatgcgacccaaagtaccgccagcaatgccgaatgtctgtgtcaaatagtcgtacatgatgacttttggaacggctgtggttgtgttaaggtcccaaacatggcgaccgaagccatatttgatgcccacggtaatcaaagctgatccgactatagtaagacactgccaggtaacaggtcagttttgatcttccaaaactattacgcgacacgtggactaaccaatgccgacaccataagaatgtcatcccagccaatcttccggatctttatttttgcaatcaccctcaagacgactatgagaatggcgatccccgtgagcgcccaaatgtctctcaggagccttgggccgtggtcgtcgaggtcgcctcgaactgagagagacatatcgctcggtcgatagcatggaatttcccacaaaaaatcagaaaggatgcgagaggcatatctacagatagacatcgatccattgaattccaaatatgcccgatgtcaaccggctatattagccttttatcatatctatactttatcaaaaaaacaaatctcatcggagatgtccatgtggccaacccgagcctcttgacccttgtcaaccctttcagctgtaacttagatagccttggaaagtataaagctgaggacgtccgtcggaggtctccgcttgaaaaagataagatatggccttgacctatgaaacctcgcaatatcccaaaattaaaaatctaggaacgagcccggtaagccatagggcacgcctcattaaaaccgaaccacgtcaatttaaaaacctcggcaattcagatgaatctatgcttccagattgattatatgctttgagaataccatagttaagagtgccaagcctccctattcaggactagtcccattttaaggtagctcttcgggtctaccgcccacgcgaccacgttatttctatcaattctattggctcagccttctatcccgccttttcaggtgaaaatctgccggattaaaacacccattacataatgcagaatcagaccttacataaccccaccggggcaaagctcggacccctcactgtaatgtcgagaaccctaaggttttgatgacgtgtgctaattaatctacgcgagggatccgaacagcggctctcacgatccgcattttcacatgccagaggccgtttcaaggtttgtttgctcgcttagcgataacagttcacgatacggagaggtcgacggtttgagttgtttgccaaggtgggactgccttcatctcatctcttcggagatcccccacgtctctcctctcatttgctcccatctccagtacagacttcgacttgagtactttgctgttccaaggatctggcttgtaataaccgagggatctttggcgacatagcttcggtgggataggtttggtgggatgtcttcggcacgataccctcattcggtaggatctcttcgctaggatcacttcgggggatgtgttcggtgagatatattgattccacggcgggattcttcggtgtgatttcccgtcgtagcttgctcgcgaggtgacatagagcggctacgtcgaactcactgtagtcaaagagcggagtttcttctttctccatgttgtgagccaaaatgtttggggcagggagttgctctgcttaagacaacttggtaaatccctgagcagcgaaaaagtgacataatgggcaagtatcagatcccaagggcgtcgttcccagggaaggaacatcacatctacacacatgaccagtaccagtttggactatgagatatcgaagttgaattctccgtcatgccgtatgtttacttggggtatgaatagtgaaaatatagaagtttggttgttaaggtagtcggctgcggatggcagcagcggcattgtctgatcctccactcgttgagtaaggtgacattggcttatgcgccttcgcggacgaggggccctccttggcccagtctagaagatctgtatatcccacgatcctagtgttttgttcatcgtcgcccccgggaacgctgaccaacgatacgtactagttcaaacggccagtcgtctgttctgccatcttgttggtcgttggcctagtaccactggggatggggattttgcttctaagttccaggtattgaggtcaattgagctggctggctctggaaaatcggtgagagcttaagggtttcaacaaggtgagggtacttcgattcgtcaatcaagcgagagtaggtggctgggtcgagactgcctaaagcggagtttccagcgacttgtcgaaataggatgggggatagtccgttttgagttagtgagtctgatattcttctgggacgaggtgcgtggaagatcccgatcacacatggggggttggagccatttttataggcaaggtttcttggcttggtgatcctcgagcaaaagaggagagggctggaagttcggatgccagctcagagggtttcgaggtgctctgtattcctgagtgctaaacccgcgctcataacttgttgaaagagcttcttgggaatgttttcgtaattgtgattttctctaatcacatgatatacgcgtgattattttggcatgagaacgcgtcaaaaaattactaggccttgtggtcaacagcattgcagcccctacaatttactcttgacaaggccattacatcccatacaagcctaacaatattcttactagtatggtgaccccagtagtaaccggacgtttgcttgttctccactgaatatttctcattggaaaaacatgcgacctggtctacagaatgggaactgtttaaggagtaattcataagatatcaagctagtttgagaaagagacatttgaaattcaatcttcatatccgacaaaataagataaataaaacagaaaaggttgtatagtataaggaataaaagaacaagaaatcaatacctcgccagatatatttcaatgaagtgtgcataggaaaatattcattcttggctggttctgccttcagccatgtcaagaccccactcaaccttgaggtctgaagtaagtatacccgatttcttgagaatcatctcggcaagagccgggacagattcactggtcaaaatctcaaggatctgcaaattagcttccaactcgcgggagatccagtttcggatctcgataccgaccagcgagtccaagccgtaaaccgtgataggcgcagcagggtcaaggtcttccatcggacgcataagaatgctagagatcttgttgagcacggcagccccaacaatggcctcggctccttcgcgggtcttcgattgccggataacaattgctggtgaaatctcggcaccgctctgtgcagactcggccaatgcatccccgccagcgagagtagagaggcgcaacaggtgcgacagcttggtatcgtttacccagaagggctgttcactggcaggtgtggatttgactgcttcaaacccagccacgcagtgaccctcgcatgaactgtcgaactcgttgcggattgctgccgttacaagaccacggatatcagttgcatcaacggactctgtgcccaattgtttggagattgcctcgcgcttctgatcgtcggagagatatccgactccacgcacaatgggcaaatcgattgttgaacagcgcatcctggctgtctcagggtactgggcgagcgcagccatgaaggttccactggctgcgtatggtgattgacccatattgcctacaaaactagcggcggacgataggttgatgaagaaatccacggtaccattagttgttgccaatgcccgttgaacgttccagattccgtggactctgggcatcatcaccgtttggtagtccgcaaaactgagcttttcgaagagcgtatccttacgagaaagttagccgagatcttatctgttgtttgatgctgataaacttacccggagaaccatggcgccgtatacaacaccacgagcgggaggcatgcgagcgaggagcggaacaagatcttgctccacgctctgttggtccgccacatcgcagcgacagacttccacattaacaccctggcggataagattctgaacagcttgctcggccttttcagtcttaataccacttcgagaaaccaggataagattcttggctcccctctctggcatccagctggcaatgttgaggccaatcccaccggtcccaccaacgatgatatatgaagcgtccgcgcggaggaggttttcgtctcttctggcgggatagacctgtgtggtgagttagcgatcatttgctccaattgtcgtagatatcagcaaacataccttaaccatggaatcatccgtgacctggacgactatcttgccgatcacctgtccaccctgcagcgcacggaatccaatctcgacgtctgagataggaagagtggtgacagaccactttgattgggcgttagtgtcaacaaacagcttaaacgcatcacgaagcagccgcttcgtcaattgcggacgcttctctctgaccattcccaaatcgacagatgcgaaggagatgttcttgttaaagtgagacatctccaaccgagagtttgtcgtgatgtcccgcttgcccagttcaatgaaacgaccaaatggcgcgacacactcgaatgttgcttgcaaagcatcaccgctaagcgagttgagggcaacatccacaccctgaccaccagtggcgtgctgaataccctgcacaaatgacatgtcacgactgaagaagatatgatcctctttcagctggtaagtttccataaggaagtttttcttttcgaggctgccaacggttgcgaagatattagctccaatgctttgagcaatgattattgccgcttggccaactcctcctgcagcggcgtggatcaggacgctctcatctttgctcagtctccccaagtcaatgagagaatagaaggcagtacaaaacacagctggaatcgaagctgatgtctcgaatgacatgtcgtcaggaataagcaaggatccagaggccggacagcgagtgaaagttgacaatgaacctggtgacattgcacagactcgatctccgatcttgaagtcggacaccgcggctcccacttgagtcacgactccactacattcctgtccgagtctttcaccttgaagctggcccatggccatcaagacatctcgaaagttgagaccggtgctgtgaacctggatctcaatgtggtcttccggcagtgctccgttgcgggaaacatcatctgtgaaataaagctcatcaagacccctcccgtctccggcagcaagtcgcaaagcccgatcttgtttgaaaggctgcatctggggaggggcatttggtgtctcttgctggacactgaggttcaatgtgttattgtcaaccaagcggggcacacaaacattgccatttcggacaacaaactcccagtcattctgggccagctgcgatttctgacaaaagactccgttaaataccttgagcatatgcttcactgcctcagcgtcgggcatgttctcccgctctcccaggtcaagcgtggcgaattggagcccagtctctgatctcacagtgcgagctaatccaattgccatgttcgcaccaagcgattccaaatcggatttgctgtgacgaacaacccacagtagaccccgagcccgactcagaagacgctgcaatgcgttgaatttgtcttgggtgagatgcgataggatcgagcgatccattcccccaaggaaaatacaccattttccggtaacatcaacctcatcagagttgacagccgtgatggggtcaaccccaatcatctccttgagaccagattcgagactgagcgacgaaaaagtgccgatcgagtcaacgccaagaatcacaacatcaccggcgtttgcgggaccggttattgggatattagcagtggatgtcatgagacaaccagattggaaagatgctccagggtactcctcgacacacaggtcaaccccggagaagtcattctccttcatcacattgctccatccttcgacggtgaggaggggtccgtctgtgcggaatttgtcattggccagccaccatccagggaggagtgcgaatgggaagtggcgtgccctggggacagtttcctcgatgagtataaccttgccaccaggcttcagaagtcctcggatgtttgccatcgtctggctgatgtcggtagtagcatgcagcacattgcaagcaactacaacatcatatgtgccattggtgaagccttggccagtgggatcagccgacacatctagtgtctggtatgtcatgagatgtctccagctctcgaactttgtcttggctttttcaaagaagccgggagagatgtcggtataagtgtagtgcccaaaccgaggcgttgaccctggttcgccgcccagactctgcaaaataggcatggtagcaccgcctgttccagcaccaatctcaatgatgttgagtgtagggttttgatgtgccatcttgtcaacgcagacagaggcattggcataggcctcgcgaagagcgtcaagatcgctgtagtatcttccgattccatcatcctccagaagtacactcaaggcgtctacctcgcccctgaggatttttggaagcaactctcccactttgaatgccagctcacttgctccatcaacggttcggctttgttcaaggacgtcaagtgataaggcatctttggtgcccgcctttcggcaagttttctgggcccaaagatagaattgccgatgatggggctcgaaggtagacaaatcatcttctgtcacagagttgaccatctgtgcaaggtagtactctgccacatattcgagttgctgcattcgctcaatgccttgggcaacatcagtctcggggcgaggaagctgtcgataatcttcggcggagaggaaatcaaagcagggctcatattgcatcttgtagcaaatctgatccggcgaattgtccgttgagcctttgatatcattcgatatgggaaccaaagtaataccattgatgtcaatgagcagattcgccgggttgctgggaacggtggcgaatatgcggtttgtctcagggttgctcgcggactcgtttcctgacccactaccatagagttggagtacagtaccagcacttatttcgtgggacaatgaaacggagatgtgcttcacatgcgatggcacaaaggtggtatgcggcccgggttcgccgtagccacgaagcagccacatgacttgactacatagatcaagtgtaacaggatgcagaatgcagggggtctcatgcccatgtggcattgctgccttcgtgtctgggatgcgtaaggtagcgagtgcttggccatccctgctcacagaggcttcggttagcccttggaagagaggaccgtaattcacaccaccgttggcgatattctcgtagaggaaatcgatatgcacaggaatattacaggaacttcgcatattcaatgcttgttgagtgaagcgtgctgtcttctcgagctcttgtcgagacccgtcgacaggattgacatccttcgcttcttgcaccatgatgaaaccattgcagtgttggtcccatccgcgaccctcggtccatgagaaaaccttgaactcgtgccagccgaggactgatttgctgggggcttccgatcgggatggtttcaaggtgagaattgtctccaccgatgagttatccgggatagtcaggacacggttaatgaagatatcgcggatatcgatctttccgggagtgacatggtgcagctgtgcatgttgtgaaatagcctccatggccatggccaagaatccggtcattggatacacagtgcggtcatggactctgtgctcgcggatccaagggtgatcatctgcacgaatgatgttcctccacctaggttcaaagtcgacattctccatgcacaatgagccaaggatatcactccgagggaattggggatggaaatggttatcacctatccgtgagctaaaccagtatctttccgagtggttccacggatatttgggcagatttgtcaacaaagctggctttctcgtcgttgtcttcaagttcgggaagttgatagcttggaagtcgagattcagaccctgtgtgaacagcgagccagctaggttttggacagcttcgatgtcatctaccttgcgtttcaaggtatgaagataatggacgttggaatttggggcgtatttctgcgcaatgtctttgacaggtgtctgcagcgcagggtgagggccaatttcgactaatgtggtgattggcgtatttgcctgctcatcggtgataaggctcttcagaccctccacaaactccacacgagagaccagattgtccacccagtaggaggcacccaaggtgcttcctgggaccaattttccatagacagtcgaatggaatgaaacctcagagtcccgaggtgcaatcttaccgagtaggcatctatattcgtgcgagacaatcttcatatgatgggagtggtaagcaacctcaacttgcaatctccgggtgaagatcccttctttgtccaaggcagtctgcagatcgtcgatgacctccgcgtctccagacaaagtcacgctggactcactgttcacacaggcaatgacagcctggttccctcgcatagcatccaaaatttgctggatgtctgaggcgctggctccaaccgctaacatacctcccttgatagacttgtcatttgctaccaagtttgccgcgacaccacgagagtacgccacacgaacacattcttcgaaattcagaatgccagccgcgtaagctgctgcaatctctccgctagaatggccgaccactgccttggggcgaataccccaggatgagagcaggtcaaccaacgctagctggaccgcagtacaagccggctggctcatatatgcggcagaaatagagctcgcgctcgggtcggtcaaaagcaattcatctttgcattgcgaggttagtgtctgagtatatcgctttgggcagtgtcacaattgggttggagacatacctataattgagaacgtagcaccgaatgatttcaagcaagcgtcaacattctgcatagtcttcttgaagaccgggtaggtgcccagaagttctttgcccataccgtgccattgcgcaccttgtccagtgaagacaaagccgacagtaggctctttggaagaacgaacaggcactgcgtcgttagatagagatgcattcagctcctgtccaaggattgcagagcatgccaacctccatggcaggaatgttcgtcgctgtcccagtgtataggccatattatccaaagtgctatctttgaaaacaaccgggaaaaggtcgaggtatgttccgattgatttcccaagctgaagagcagcctgtttatcgtacgcagagacaacatacaaccttcgcctgagaggatcgttgttcgctgcaaggtcaccttcgtgccggggaccacgctgtaggataacatgggcattggtcccgccgaagccgaagttgttcacacttgcgtatggtttgccacggggccaaggcatgagcttcttgggaacctggttggatgtttagctcgatccattgatacctcaagtcggtgcttgatcttaccttcatattccagtcttccatcggtatctcatcatttgccttctcaaaattgcagtttgggggtacgaagcctcgctcaagtgccaaggtagttttgatcacagaaacaacgccgctggttccttctgtatgaccaatgttcgattttacagacccaacaagcaacggttgacgcggagtgcgtcctttgccaaaaacggcattcaatgcagtggcttcgaggggatcaccaactttggttcccgtaccgtgagcctccacaaatcctaccaaggacgggtcaatgcgtgcctctttatagacttgacgaatcagttcttcctgtgccttgccatttggcattgcaatacctctggtccgtccatcctggttgagaccactgttgataattacagatcggatagcgtctccagcagcctccgcatcctcaagagacttcaatataatacatccagcaccttcacctcggccaaagccagtaccgcggtgatcaaatgcatatgagcgaccagtgtcggaaagtagtcttggggattaatcagcttttgtgggtcaaggagactgccagtgacacttacctagaacgtgtcattgagatgaaagtctcgggggttatattgaggtgacatcctcccacaatggccatggaacattcaccgttccggatactctgagaagccagatgcagagcagataagctggaagagcaagctgtgtcgaccgtaacactaggcccgttcaagtcaaaataatacgaaattcgattcgcctgcaatgccacggctgttccagtggcagcatacatagggatagccgtgatatctttggtgttgttgatttcgtagtctgggtatgaggcgcctgcgaagactcccactttttggccactgatctcgtgactcggaattccagcgttctcgagggcttcatacacacattcaaggaaaatacgctgttgcggatccattgatctcgcctcttggagtgtaatgttgaaaaatggcgcatcgaataggccaacgtcttctttcaggaagtgagctcctactgggttgaaggaacctggtcgatctggatcagggtgatagaaggactcggcgttgaatcggtttttcgggattagcgaccaagcactccgtcctcgagaacacaggtcccagaactcttcggccgtggaaacgtcgcctgggaggcggcaggacatgccgatgatggccattcgcttgggcacatcgcctgtggcattatcggcgatctcactaggtgcttcgtgcaaaaatgcattcgcgctctcggcaactggagttccagtcccggagggctgttgaaggcgcatctttgatagattcggtgtttggtttgaagatgtcgaattatgtacctggctgtgtcccaatgtccaacaagtgtccaaagagacaaatatggatttgcaagaaaagatatgtatagaatagtacaatcacagagcgttcgaaacaggcactcggtccatccaagtacttcctgaaaggcagagagtaaacaacaagggcgtcgagatggtttgtacaacatagagtgcgaaccgcccttgcataaacacccaagcgtgcgcgtgccgatctctgtccagtagtttcctgattgaaacaggggatttaaacactgaatcgggcaatgataggtcgagagaacgcttatgtctgtcttccttgatgacgaatctaacaactcgcagggacgtcaatgggatcatccatgcatgaaagtatcccctcgattcctcgttagaggtttccaggattgtagatcgagatcagtacatctgaccttgtccatgtatttgcaatggtctggatagtgttttctccgatgcccttgctaaggcgagggtgcgttctccgtacattccaaacacaggggcaaactcccgggaccctggcagattcctgatggcataatttgttattggtgcctcctcgcgtagcaagtatctttatagaaccctccgggtggtattccacctcgcttttttctccgaagatattccccagttgattatcgcgatgaagtttctatgtctcccaggtggctattgcagtgccaaggtatgtcaagcattttgtcacgtggaataaaatcatctgacgccgactatacaggctctcaaaacacagctaggtaagaagctgcatttgatgcgatgaacgtcggagagaactaatagtgggtacaggcccgttctgcgatgccctcgcggccaatggaaatgccagcttccactacacgcagggaaccaccgaggtgcatgttcccccagaatcagccgggtttttcggtccgccgcccaactataccttcattaaggttgatgagcctccactggtccatacgaacttgagtgacttcccgaaacgcgacaccccggaagaggcaatgaaagtcgccacaaaggcggctggcgatcccacattttcatgtatcgctgaggtcatggaccgtctggtcggcattcttgacagtgaaggcgacattgatggtgtgattggcttctctgagggcgccctaattgccgcatcgcttattctagaggagcaaagaagagagaaggaacttggtcgggcacctcgacttaaatgtgcgattatgttcagcggatggccaccggtacaccccgtgactggaaaagttctcacggctgacgactataatgaagagccaatcactattccgacttgccatgttgtcggtgcatcggatccgttccttgatgggtcaatggcactgtacaatatgtgcgatccagatactgcggacctgtttgatcatggggcaggacatacaattccaagaaagaagcagactgccgatgagattgctttagttgtacgcgagatgatcgactgtgtggcttgagttttcctttatatagcaacacaccagaaacaacatccgataggctagatttacgcgctatcccggacattgggtgcatttcatgttctcataaatatagaattctcgcactagtctactccagcagcggccttgtctctgcttcttccccctactcaaattcaatctgaccctctgttcgacaccattgaggaaagagaccaacaaaggacgcaagtcccagatcccaaactcaccccctagtgacctccgcccttcctcgtcagcctgtccatacttcgccgccttccaacgccatcgggtccggcgcacaagccacaattatccaacccctagaacgcccaacgccaacatcccgagcacagcaactattactgacagaacagtcaaggtactcgcatggcacccaaatggcagagctctcagctcccatatctccttagagccaagggggcagatgctttctgggccgacaggcgcaagtatcggacccgtgataggttaggaacacaggtcgaggactataccacaacaatcaatagtcagcagcatatgacatgtctgataaatcaaagcaaaagcaatcatgagatccgtggtaggtgaaatgtggccttgaaacccccattctgggggctggggacgcaagggagcaggatgtgaaacgaatacgaggggaaggttcgcatatcgactgcaagttaccgggaagggagaggaggggagaatcagactcgactacgagaaaaagctggtcataagagaatgcgacctactatacaatatggaaaagcggatctctggaatcagggttgtccaaggggaagctagagttttccaggccattcatcactgtttacttggttaaataccatgtaaggtggttgtggtatagctggttcctgtcctcaatagtcagatttcttcccttgcagacagagcactttgcccctggtgagttgcgggtgaatgtatagtgagataaaatatttgcgagaaatcccatgtgttttgtatagagcttattattttgcaacccaacatgagactatcaattggatcaaaagttgcgcagtcatgcatttttgggctgcggtacttttgccactgcatcctcagggcatctacaacgcacacacatacaagtcccacatgaagggtcatctgagtcactgtggtggtacagagtaatattatatagacttgatgatcgcatgacaccgtggcgtgaaaacgtgataaatttatcctggtgaatcgcgctgaaaacgaactggcgcagaaataccaaaagccacaattgtcgctcatcgatgcataacaaaagggaaaaggagatgttttcgctcaaggaaagagggtaaatcttgttcagaccacgcgcttgacctaaatatggagcattagtatatcatcttccggtgtctcaatcaaaggaacccacgtacctcgaagaatctcttgagccaccacacctggaacacaccctcgccaataaccaccataagttggaacatgctccaccacttcacgcggccgttcgtgctctctgcagtattgcggtgcactcgctcgcgcacgacgatgtacgactgctcatcctttacctgcgtcaaagcctcgctaagtttgcggactagatggtaccagatgatcagtcacaatatccttcatcttccgtcggctgttatttcccacgcttaccttcgacctcgaggggatcctgcgtcatctcatgttcgggcacgtagacaattccgtggacgttgaaggagacctccttggagttggaggtccagccctcgttgctgaagcagtagttgtatttcccgtccagctgtgcggtgaaggagtagtcgtcggaggcaacagcttgcttgaagtactggcggtttctcaggggatcctcgacctgcgacgaccgagcgttagcatctagcttattttgaatcgttcctctatcatgatttagcagctggcctagtccgtaggtaggcatagacctctcggtttatagatccgatatcccatgccagagccaccatcagagcagaagcggactccctagcaacaccgggataattcatacccagaaatcaacctcaatgttattgctccctccaaactcccgatctccaacctggaaagtgacagtcatgacatcgtcgcggtgcagtgactcgtggaagcattctcgtgagtgagacttgagctggatggtgtgtgcggtcgcggcggtgatccaccccagcgcggtgaccaggattgcgcttgttgaaaatctcatattggaatatttcggctccgatgagtctggggtgattgacgagtgcgtgggtggtgatgttggtgttggccgtcaacgtcaacgtcaacgcgcaaggtgtcaattggcggcgctcggaccacttcagtaaacaccgctccgccttgagattcagtcttggctgtatactggagttgggtggatttagattgtgatatgaataattatgttatggttagattcaatgggtctctcgaaggattggcgtctattcgaatgagaatctaacacttgtaaagttataccgcaacatatatatcgttacattgtacgtcaactacaaacagcgagagtctttgtagttatgtacaagcgtactgaacacttgcataagaagagtaacgtagcagtggtaaaaagtctgaattcattttgaaatagtaaacactcgaacagtgataagctacaagaaacacaacgggaaagcatgtatatcaacaagctacatccgacaatatcacaacaagggggggtacatgataatatagaacagtcaaaaaataatgaatgacagagattgactattaatatgtatagaaggcatgtaaacgataggacatgaaaaagaaatgtaagtaggatattcaatgtacaagttctttggggagatgagaggtaagaggcaagcggaataacggggtggtatcaaatccgagaacgcaaacattgatcaacggccatgaagccggaagatatgtatgtatgtcgaaagggggaatatggatataacgagaggagagaaacccgaccaaacgcagagatagcaaagatatcacagattgaggattcgtcctgtgggaatttttctgccgatagaaaaaaaaaaaaaaaaccaaattaaacaccgagcggagatggagttcagaaaaatctataggtaagatcaagggcagcagaatcactcttcctcagtggagggttcatcagaagaggaaacgtcagcgtcggcgtcagcttcgttttgaatgatatagctttcttcggcttcagcctcatcaatcgtaggcccaaaaggactctcattatccctctcccttggcgaagccgagaccatcccatcaacggtactctcgttctcatccgcgaagctcccatcctcgtagttcgccggctcggcatcatggtcataactcgagcgacggagaagaggcggcgtctgaggcggctccatggcaggtacctgactgcgaaccgcgccacgttttggggctgagttgaagcttctcaaggggcgagtttgcgcaaaccgtgcggcagcactagtctgcgagccagtaccgttcccgcgggcgtgggagctcgggggtgttagtaggcctgacaggaaagtactcgcgttgctgggctttgacggggtctgattggaggcgttggcggcggattcgcggccttttcgccaatttccccaagcggcagctgcagctagggggagggagcggggtgaggcggcaaggtcggcgagggacgggaggttgccggatgctagccgttctttttcttgctgctgcatttggagattggccttaagacggatggctgcgtcgcggacggcttgctgattgaatgcgggcttggacacagtgtcgattatgtcttgcaggtcgtcaatgcggacgcctaggagctcacgcagccaggtgatctcggtgtctttctccttgatcttatttggcgcatctttatctatcgcggagacttcctgttcaagctcctcgatacgtgtctcgcgctgctggagctggtcctgaaggacgaagattgactcgcgcagggcttgaggggagatccgttcgggttcttcagatcccttgttgtatgacatggacggcgtcgcccgcgagtgcgaggttgcggcagctgcgaccgagctgggttttgccttggcgctgtgggctgcctcagcagcagcacgggcagcagcttgagcgatctcaaccttctcttcgaggagatttacgcgctcttggagatgcttagccttgtcctcggacaaagccatccgctccatgttatggctttccccgcgtgcacgatcctctgaagagttatgcaaagcgcgagcgtgacgttcgcggaggtcattgagaatgcgctcatgcatcttgcgggtctcatcgatggcaagatccttagctgccagggcggtggcctttgagtccctggcttcctcgaggagaagctcgtagcgctcgcgagaggtatcggtatccatgcggttgttatcaagttgggtctccagacgaataatctgagcctccagctcggcacgcacaatgttgacctggctgttagcagcttcgaggtctgcctccatcgaggagcgagtgcgctggatctcgacgcggctgctctcacgggcttcgacaaactctcgctcgaaccgggcagccttgatctgcagttcatggttctccgcccggaggctagtgaccaactcctccagtctagccttgtcttgctgagattgctcatggacgaaccttaactttgtggcctcccgttctttcttttcgaattcgtagacatcctcctcaagcttctcacgcaatttgagctcgcgggagtgtgacgcgcgcagctcattatacctggcagtgtggtcttcctcccttctgcgccagacagcttgatcgcgagtaatttcagcagtgacactgatcatgtcatcttggagacgatcgaacttttcagtgaggttctggcgcgagatcatgctatcctcaatgcgagttcgcaggtggtcaacggtctcatgaagagacttgttctcacctctggtagtttctaattgacgacggaagctatcgctagagagacggtactcgtcgagggtaccctcaagcgcgatgttcttcgtagacaactcggcgatagtaaccttgagagtctcgctctcttccataagagactcagtgcggaactgcatcttctcaaagtaggggatcttctcttccttgaactggagcagacgagactcggcatcctctgcagcagcactgtgacgagcagcatcttccctagcaagcttcaatagtcgctggacctcagtcatagcatcctgcgcgtcacggcgatccttgtactcctgctcggcacgctcatcggcaactcgcaacatacccttaaggccctcgatctggagcatcaggctgtcggcaccaatctcctcggcctctgacaggcgcgggctcgggggtttctgcaaggcgatctgctgagccaattgcttggccatggcttcctcgagaatctcgcgcatatcaccaacagggtcctgagcgagcttcttgatcgtgagagcctgcagttcagcaatgctttctttcagctgcgacatctcgtgatggctagagtgtggggaaatgcgttgagggatgtcatgggtaatcaaagcttccataacgacattcttgagcatttccagcttacgttccctcgtattgtggggcgagcgatcgcgaaccgaagcttcctgaccatcatcgtcctcatcatcagcatcactgtcttccatctcagcggatgtgctgcggaagaccattctgcttgcagtgccactggcaatagaagccaccgactgctgaatgacagccaaggcacgttccacagggcccaaacgatcatcgatcgcagagccaacaagatcgttgatacggcgatcgaagaagcggttacggttcatgaacttctcgtcctcaccggccgatatcatgtcgtcccagtcactgacatggtcattttcagtaaagagctggcgaacaggagactgcagacgagagataaggctcttctgcggagagaaggtagcattgctgttggcatccatgtccgagccatgtttgggaacggtgagtttgtaggtcttggggactccaccagggctcggactgggtgcttcgctgcgggcatccgcagagccaaaccgcttttccttcgtgggaccgcccatcgactctgtgaggtgatcgtgtcgcggctggaagggggtcgcgtggatcgtttggtaaggagtcgcgtggcgctcgatgccaacatcggcgtcgtcatcgtttagctgttccataattgcattcagctcctcgtcgtcaggcgagtcgttctcggagtcccaatgactgtcgtagtgcttatgcttgcgggtgatgaagtctggttccacatgggttggggcgttggactcaggtttagcatgatgatctgacgtggttgtattcttagatgggccagtgacagcgaatcgagaatccatgagtccagcttgcttgtgtttcatttcaacaggactcgagagagtgttttcgatgggctgctccttgacgatatttgctgcaacgggttttgtttcagcaaagctggaaggctgcacagtcgtgggaacaaatttagaaacagcaggcttgaactcgaaaggctgggcactagccgatagcatagtggtcttggtcgagctcttagatccatgaagagcatggtcgacatccttcgagacagtgacagacctatcatctcctgctgcaggctcccttggttcacgttcttcgataacaatgtccttagaggtccgcgcccggatcggcgatccgggttgagacccgttctcggcctcacgtttcgcatcgaacaaagtccaagtatcagcttcactgacaggggtacccgtccggtctaccagattattctctttgggaatggcattctccttgccgtcagcgacgacatgcagcgcactcgaagcttgagcattgcccgcctcgcccagaggttgggtcgagctactatatgtagcctcgccctcagcgttgccgacaccgcgacacgcacgcttgtggcggtcggtcggtacaggtcgaccattggtgtcgtcttcaacggcctgctttttgtcattggtctcctgttcgatttcatcaggtcgcacaataggaatagctttagacttcttctcgggcgtggtaatcttgctggtgtcaatgtcgccgaagattttggtgcgactagccggaggctgctcggagctggcattcgagttgaggccaatagaggagttggggttgaaaacaggtgcgtcaacattgaacgatgcggcagagaatttgaatccgccactactactggcattgtggttcagcttagaactcattggtccattcacattcacagtgctaccaggcacgaacgagggaggcggggcaaaaccaagtccttggcttctgccgaactggaatgggtcatttccgaacggcacaggctggggattgaatgatgcattagggttgaatgccttggcctcaacgttgagtgatgaactcgagagctgcgactgatggcccccgtggtaggagtggccgctggcctgtgtctcgtgccacggtccttggcgagtctgtggcgtacccgcgacgctgggatttgtgtcgaggtcagacccatcatgaccattctgttggtattggtctccgtagatttgctgaggaagctggtgctgggcgaagggatgaggcgggagtgggtggttttcgttttctggcaatccccagcccgacttcagtatgccggcattcagccctgcatggccgttgacatcacggtaatcatcctctaattgccggtcgatcgagtcttccaaatgataatcggtatgtgtcatctggtccagccctctttgcagagtctcgctcagattatgaccgtgacctcgaggtgtaggctgggcaatttcgacactcgatgcgtggaaattatctgggtgtccattgaccggggtcttaggagcctggtatggcaggccttcctggtgcataccatggccaaattgagcatcgaacacacccttatcgttaaatgccgggtagaaagacccttggtcatgtagcggagacactggtgatagcatggaggaaaagttgcccatggcccctggcccagccgaagaagttggctgccgggggtttatgaagccttgaggagtcatagctccctgagcaggaggcgtgggctgaaattggaatgggaatccacccatcatattttgatccgcacccatgaatggcgtctgcataccgaattgcgaaggtgatgccatggttcccataccaccaggcgtaggcattgatgattgattgaaatgaggcgagaatgggtgaatatggccgaggggattgcttgctgcggacgcagtaggaatcggcggggatgtaacaaggcctgggaaaggcgtgccgctagggtttaacgagtaatccggtgaaatggattgtgcaggttcatcatcgccgaatgacactcccagggcgcgtagcttttcttcttggagctcggtgatataagcctcccacttggccctatctgggaagttgacgacaagtggctggctcttggatatttcatggaggtcatatgggtcgggatataagggtcggctgagacctcctagagtcgtcattgtggaggggtcctcggaatcgccaatggtgaatccacgaacatcgtatccttcgtcctcccattcttgcattcgctgctgaacgtcggccggtgttaggagacgatacccaggttccgagcctctcctatcgtcatttggcagctcgattatgcaggctttcccacgccaattcagcttctttctccgtcgtggtgtcggggtggctgccctgctgatatcagggacatgtatttttaatggacccgggttgaacgggtcttccatctgtgcagcgtcctccatcgcatctgcaggcggaggaggtaacggcttgtctatcggcgagtttacctcgacggtaggtgtgtttgaatttgacatgttgtcttgcggtggatctttatcgtaagcgaaaccccaaaaatcctcctgccgcaaggtatcagcgcgtttatgctgacctttgttgccttttgcacgcgcagcggccttcttcccgacgaaatcagagagcgttggagttttcaatagatcgtcggaacgaaagtcgtcctccaaaccaagccaatcgtccgaagcgtcgtcagcgaagtggtttctcgcagtgataaacgatggcgcttcacttccagagtcgtcgctaagccaattgctccgctccgttctaggctgaccagtaaggtactggttgatccaatcttgcgtgaagtcccgaatcgatttatctccgatattggcgacgagatcgcggtccacgggtacaagtatgtcgtcgttcgcgatactcgatctccgcagctccgtgtggttggctactgacgagacgggcgagctgggaccagatccgttgtcgatctcggagagttcgagttggctattggtcactgacagtctccgagtgctaggtgctgcatatggggatccccacgcggtggtgtagtagatgctgctttccgccttgcgattatccggcgaagaggacccagatccttcggttgcgcgatatgaggataggaatgggagaggcgggggttcaagggtgatgctccgcggagaggttcgttgaccgggggaaccaacggtcgacggactcgagtcttccgatggcggagacgacaagagtagtgagggagccagacgcgattcacggatgaggcgcgtgtctcgcgactgaaactgtggagaaggcgccgagaaggcggaaaatacggagtgatctagatctgtggacattgaggtggttagactagcatatttggagggatctagagtgattgaatcaagggagttgaagaataaagtccacgtcacggtgtagcgcgaaatagggagaccaatttcacagtcccaagaagggttcaaagagagataatatcaatgcgtatacacaccttccgtgtcgactcctgcagcaagcacttgcttgccgctccgcttatcgtccagaatgttgacgcatggaaatcaaaccggaattgaagaccaccgctggcaagacaacctggggccagataatgtacaggttgtctttttctggtttcgggataggcacactttgcaagtgaatgaaagtaatggagagatcagaagcacggtcaagtctgaagtatcgaagaccaggatggggaactaaggggaaaaaaaggttggacgtcacgggtattggatcttcgtactccgtactgggtacctcctagagtgtggatagcccgagctaatgcggtgtacaggtacgataggcccattcaacgctcactagtattatttgtttagcgcagaccgaggccgttggtttagctgtgttggcttggctttcccgacaaagtcaattgctatatctacgcatagcacatgtacccttaccttttagatccagaattaaggattgactgtaagttgaatgctcatggccactactgtgcttctgctttcgaagtagagtaaacaatgaaaactggagttcccagagattcaggggtagaagaaaagctttccatggatttgactgtaccgtaccactcccgggcgccgtccacggaccctattcgcagcatgactaatggtttgtcttgtcacgagccaatcagcgtctatcgtacaacaaaatggttctaaggagcgtatcttcatgctgattggtgagattttgtccacgggagtcgggtaatatctgttgccgccccgagactagtctaaaggactcgatgttgaactggacgcggagttcttttttatcttacccgcgctcttctccgaaagtgtcagatgctgataatacaagtacatattttgtattgtaactgctaattgaactcagcacgacgctgcagcaatgcccatgttattatttacttatacaatcaaagcagttaagccatgtagccatatttccattggagtaggagataagcaaccccagaataaatcagtacaatccgaagaataaaccgctagtcgcgggcaaggtatcaaagcaaagacacccggatgaagcgaacaaatagtcacaagtcgtctagttggggcaggaggtgtcgaacttgaccttgcggtccgcggtgaacagaccccagtgcttctcatccttcatctcgccattgtcgcccttggtatcgggcttccaggactcgtcgaaggcctcaaagtagaacaggtcaacaccccagtcgagcatgccacagataccagtcttccagaaggtctgagcattcttggtaccggccttggcagcctcatagtcagagccgccatcggtgggccagccggtctcaccggtaacaatgttgatcttgtcggcgttgtcgccggcgatcttctggatgtgctccatggcgccggccatgtcatcgaagtaggtctggtaggccttgtcggcggcagtaccctgccagtaagcaaaggcgttggccaagctacagagagagtcagtattagtgcgcagagttgccgatttcttctacatttccacttacacatatgtcacaacgggctcctgggtgaacagggcgtcgccagtgccgtcagcaagcttgttccagctctcggcggtgccgacaaggacacccttgggcacattatccataacgtggctgatgtaagtgtggagctggggtccagtcaagtcaccacggtagagagtctcggacccgacggtgatcgcatggatgacatcctcgtaaccgggaatggccttctggatagcggcccaatctcccttgaaggagggctcctccaaaagattattggtatcggtaggcttgcccaccctaaagaagtaaaaggtctgttataagaatagttccgattagggggcgagaggaataacaaaaaacttaccacatgcccagaacgaccttgaagcccttgtttttggcagcaggcaggatgttttgaggggtgttgcactcagtgccggagtaagtacggacgagagtagacaggctcttcagggcatcgaaatccgcctcatagtcgctggtagacttgcaggtaccgtcggcgttcttgtcaccgagggagaaaccgagagtgcccttagcagagaccagggccggggccgcggccaacaggagggaaacaacaccagatgcacgcattgtgaaagatgaggtcgatgaaagagggtattcgaccaaagagtgacgaaaacgaaagttgaaaagaatgtaaaaagttataaaatcaaacgaaggtacgtcagggaccaagaagaaagacccagaggattggagattgggggggaaatgagggtttagacctttagaccctgacgggtctggggctttgcctaatgtggaggaaggtccccactaattgtgtatagggggtgagaattgagccaatcaggaggaaggaaactattcttggatccatggatgaaacagttcccctttaaagggtccggatatgttttggtgatgtatgactgtgactttgtcggcctaactacggagtataccattcctatacccaaccctctcctatatttctgctcctcggatcatatttccatctcacatctcagcaagaccttgtatctaagagctaagtctgatatctttcatattttacatgcagctgcagagtcgtgatatcaccttgacaaagcccagatgccaaccaaggtagaagcccagaatctggaaagtcccatgtggagagaaccgatcggatggcaaagaatcacattgtgttgtcacaccgcccctatcctattactcgaagagaaccacagtgacatgtctttggaaccggatttcctatggttcactagaatctggccaggtcgacctccctacacaacactctttatcgcctctatggccgggagtaagccatcctgaaccatatcgagattacaacgtcactaagaagttggtagagactcgaatgagccgagtctctattgttacacagctgtatcaaaaatatatctaacattctttgctgtataacaacctgcagacattcaagcgtacaatgactattctcatagaaggacacgcgcaaaaggtatgcatatacggagtaacatacggagtagttagacgtaccttacctcaaaaactcattaccaccatcgatattcaactcagagacctattcctttccccagaacgctctgatattcctctcaattcctagaacccaaatccaacagccggcatttcccgagccagtattgacagcgttagagaaagtcgcacgagcggaaatagtattcgaaagtgtggatatgtggcgaacgaatggggtacgtagagccaacgtacaggatgctgctgcaaggagtcaatgggggcggatttcgtattgtgtattatttgggactgagcatctggaaatggtggaaacatcaaatatgtaggcttttgttgtacactgggttagttgagattgggattgagttgtatacgggatactgcgtactgagccacgagatatgtcagtgggggcttgtcagaatgttagatgcatggcagtgctctgtggcttgtgaatccagggttagcttagtacatatgcaaatgtaacaaacattctattgtgtggcgcagtcccctgggagagggtatataagggtcccctccccccggatcttcaccttcttttctttcttcttcatacttaccttgtttgggtgactgtgatcaaaaagacagttcaccacaggctggtccctgcattgcacatcgcggcggaacagtctgttcaatggcactcgtgtcattgacaggcgcattctttggcacctccatttatggaatattttcttttcatcaatccttgagccagtggcacgaggttggagaagaggatactgtaattgatgtatcgtagtcgcgtatttgtgttggtatacaactgacgctaagtccttagcctatctaccattgtctttctcgtgaaatattcaaatttgtccccattcccagtccacaaccccagtccgcaatccaagtccccaatccaagtccccaatcccaatccccattcccaatccccatgttgttgaccccgttgaggactctagaccctgagattacctcttcccaacacgtcatgtggtgctacgttttttttctcttttttttttacatcgagctgacattcattgtaagttttcagctattgttaacaagctctatcatacaaagtgtttctgacatgattcatagagggtatgataatatccgacgatgatcgccggtctagacaatgacaaaacgccttattgtttttaatctccaacatgatactatgtgatcctaaaagttgttccaaatccccccaaaacgccagccagctcatattacaacgcgagatttttctccttcagatagagctccttgagagtgctcagctgagtcacagccattgtctctcgcccgagcttacggggcagatcgactataatatagtgcatgagggctagtccatactgtccgaagaagcctagaatcctctcgcctgatgatcgaaggagtgctgccaggagagcaacctgggtttcctgtaactctggaggtggaattgccaaaatcttgtggatagtggcccagaacatcgtgttagggaaggggttccggcgtggagacttcgcgaaatttcgaagcgtcatggcagcatatcccgcacccagagcggtcatgcggtccatgtgaatttgttcactaacccatgaaccagtgtctggtgaacgccaccaacccaggacacggcgtccgccctcggtcttgtcgttgcctgtaaatccccacagggctgggcagatgacacggtatttggcccacatgatgtcggacatgtggagccctttatacgtgaatatatcgaacgagaatatctgagcagcaatgatgccgatcggctcagcgtgggattgcttgatagaggcttcggctagaagagaggatatcaagctctttgcgaggatgttcaatccgtagattagcattgccggtactttgttctcggacttggcaatctcctcaggtgggaatgcgaagaaattccggatatccactgttggctccgggtaggcgagagctttttcaagctcagtcttgagctgaataatctgcgtttcgttcaaataatcaatacccaaacaaccattcggcgagtgtggggggattcgtacctgctgcttatttgcaccggttccagctcgaagctgaccgacagatttcttgatcgagcgtcgtaagttgcccatagtcgccttaaggttagattggctttggcccatgtccttcagccattttcgcatgtccttgagagtcttatgcagctccacgtaacgtttctgcactcggatatcttcagccgaaaggttcccaccaccgattttctgctgctgttgactgtaggcctttaggtcggcctgttcctgcacctttcgggcgtcctcatcttgcttgagcttctgtgcgtcggcctcttctcgttccttgcggagtttttcctcgttcgcggctttgcgtgcggtttcaagggcagcggctttcttatccgcctcctcctgtgccttcttctcggcctgctctttggcttggcgttcggcctcgacgcgcgcggccgcttctcgttcgcggcgtgctttttcagtcttctcacgttcgatgcgctcttgttccttccggatcgcttcttccttctgcagacgctcttcctcttcggcgaggaggtgatccttcaaggttgtctccgcttcctcgcggacgcggtcgtggaaggcggcggcctggtcgagggcagctgtatggactgcttcacgctcgcggtcgatccggtcgagattttcataaaacgttttgcgctcatactcgtggactttcttcagatcggcgtcaaagattttgacttgctcaagatcgcggacgaggtccagcataagctgcttggacgggctgtccagtggtgggacatgattccgaaatcgcgtcattgtaggggtcgacatttgagtaaatgatttatttatgtgttccaaaaattcctggtggaaggagtggtgaatgttttgcggagaggttatgaaggttcggaggagtagcgacgggaacgtgtgatcaagtgaatatggaggtttcaagtgactgggatcatatccgtagctcgaagagtagagttcagaagtgccgagaatagaacaatatctcaaaatatcccaagctggtatcaatctgaatttgaaggtagagagggaacggcacagcgtgagagcaattggacgaggggttctgaggaaatgcgacgaaggacgaaagtaaattgcgcgtgtagcgaaatattcgacgttgtcgcgtcaaaactagtagaaaggagggtccatggagatcggagctatgtgaaggttgggattagcatgtaccattcgaggggccacaaacaaaatcaagcgtttggctgcattgcataaccatccaataataagcgactcgacgattcaacgtacatcgatgcacctgcttcaatatttcctcaaccgtttagagccttatgaagccaaaggaaataaattacctgtaaagttcaatcttacctccaaggttctactttcaccgctttctatcaccgccttgctatatcggtactttcggaatatcaggctattaaacaggcttgccctagtagttaggaagattaagatacataactacgaagtacagcaaaaagtgatatcaatctgatttgaatctcaattactcacatcaatcaacctatctcctactatttactgccagtctattttgcagccaaagagggccttctagacccccaagacaaatgagtacataagcaagacccgcgagccggttcggttccctggcgcgctcccgcctggaaacgttgacgtttacatcatcgtgagcatcatccattttgacctacactatataattgggagaagggaatacgaggtgttccatgtttctccgatgatatgtaccggacttgagcttgctaccctttctttgggctatgctgaataattagctcagcggatactgttcccatacccttaaaaagaccctagactagccaactcaccactagctgtctatatttgaatccatgtacggattcctagggaagagtccatgtttccgatttgcagactagacacccctatttacttataggctcccattaccatactagatactctaagtaggtcctcaaagcatttcaacggatgcatcaggatgatgataactggtagcaatgatcatccacggctgatgaagcggagtatgacggataactgttagggtatttacacgatccacttcggggttattgcgctaaacgctgtaataaaacgtggtttggtcatttccgaacacgccttctgctttccgtaccaatggccctctccccacacctctttgtatctccagcatcacctttcctcttctcctttcccccccctcctctctcttcttatcccatccctctcttcttccccccatatcactccttcgagtcgaattagtcgatggtttcatcgtctattctatccttccctataatttcagtacttactgtcattctcttcgaggatcagctctgaattcccgttttagaactttggaatcatcccggagacaagctcgttctaacggctttcttcgcttaaggccaacctcaatcctccgtcgaggtgctttttgtctgaattccctttttgtcggttgcagtcgtgctttccagcacagctccatcccctcggtccttccaactcctgttcgaagcttcatcccgttgctaccgtgttgctcgatccaagtttgccctgaacgtgcaattgcctcgactcctacttaacatcatccggttgcccctcgtcgcctcttggacttgtaaagaagaaaaaaacgatcatcccacattgagctctacagacgtcattttggaatgctagggttcggaggtcgtcattagtttcatcttgcaggtaagaagaatcgggatatactccacgcatttactttggaagtttcacccggcgtcgattgcccttgccgctttttcattgttagttgtgaggtcatcgtcgagtccgcttctttcccccctgagatggaagcttccattgggtccgcccttacctcgggacttgtactgttgatattcgctctgacattgccttgtccccctcttcttgctttctctcgttgcttctgtcatcttgcacccttactgatccgctctttgttactcttccaggataattcacgtattgaaaccaacaatccgcacatacaaacttcttttggtcggcccgtgatccatctcacttggctcatttgccttttggcgcagtaccagtctctcctgtcgccggattcaccccgcccaatacacacattacattctacagtaattgccagcttctgtcatttgggatcatggatcaacagagtcaatctgggcctcaaggccccggtggccgcaagttccatattgctcatcggagaagtccatctgagctcaccccgttgatgagtatgtgaccgctctcgtgaccgcttactatataaccattcgtcccatcatatcagctaacttgagcttgtctacagtggaacaactggccatccaacaacagatcgagttgctccagcagcagcagcaacaaattgctgcgacacatcaacaatacgttaacatggggctgttgcagccccagcaactaggccaggtgccctcgtttcaacccggtgcctccatgggcggtgtctccccacagcaagtgaatgcattccaattcccacaggggggacagcagcagcagcttggagtaccaatgaacgtaccgaaccagcattcgcaccgtcgcaaccagtctgctctccctggtcttcccatgggcccacctcctgccccgtcttccggagcgtcgggatacgccgattataaccagcagggccaaaacaacaataaccacaagaatgagaacgccggtcgcggtcgtggaggccctcccggcggtggtcaccagcgccgccactcgcttgctcttcctgaggccaagaaagccgccgagctggcccagcagaagagaacagcttcgggattccagttcccagctcctgctcctggtgcaggtagttctgataaccagtcttcatcggatgacaagcctgtatccacttccccggccccccagggacccgccttccagcgggccggaaatatgcgagctggtggccatggccgcagccaatcgatggccatcggtggtaaccgggctgccatttccggtcgcggtgcaggcgggttccaattcccccaggccagtgagccagtaaccaatcaatctgataatcaacgacgacccagccagaacggcggccatgcccggtcatcctcgcgaaacttcgagggtaactggcgccagcccaacaaccaaaatcagagccaggatcagcagagacccatcggtcagcagcagggtggattccagcccggtcaccgctcgcgcggctcgatgaaccagtccatgggctctattggtcaattccagtatggcggccagccccagcttggccagcctcagcttatccaacttcctcagggccaagtcatgatggcacctcagatgttcggtaatcagcaactgaaccccctccagctggctcagttccaagcgcttcagcagaacgcccaaagtatgggtggtctccaggcgagccagcatgccccgccgcagatgtctgttcaacagcagcagcaacagcagcggaagactcttttcactccttacctcccccaggcaaacctgcctgcactccttagcaatggacaattggtcgctggtgttttgcgcgtcaacaaaaagaatcgttccgacgcttatgtgaccaccgacgatctggatgccgacatcttcatttgcggtagcaaagatcggaaccgcgcccttgagggtgactatgtcgcaatcgagcttctcgatgtcgacgaggtgtggggtcagaagaaagaaaaggaagaaaagaagaagcgcaaggatatcaccgacgcccggtctaacagtactgctggaaatgataagcttggtcgctctgattctgccggcgatagacaggaaattggcccggatggaagcatccgtcgccgtggtagtcttcgccagcgtccgacccagaagaagaatgacgatgtcgaggtcgagggtcagagccttcttctttgtgaggaggacgagatcagcgacgagcagaagcctttgtacgccggtcatgttgttgcggtcattgagcgtgttgcgggccagatgttctcaggaaccctaggtctcttgcgtcccagcagccaggctacaaaggagaagcaggaggccgagcggcaagccagagatggcgctcatggccgttcccacaatgatcgtcaccaggataagccaaagattgtctggtttaagcctactgacaagcgtgttccacttattgccatccccacagagcaagcacctcgggacttcgttgagaagcaccaggattacgccaaccgaatctttgttgcttctatcaagaggtggcctattacctctctgcaccccttcggtactctcgttgagcagcttggggagatgggtgacttgcgggttgagacagatgccctgctccgcgacaacaacttcggttcggatgatttctccgatgctgtgctgaagagcatcggctgggaggactggtccgtctctagcgagggagacgcccttgcttcgcgacgtgacttccgtgaagagaccatctttacgattgaccccgccgacagcaagtccctcgaggatgcgttccatgtgaagagccttgccgatggcaaggtcgagatcggtgttcacgtggccgatattgctcacttcgtcaagggtaattccctagtagaccgtgaggccaagaagcgtgggactgcagtctatctagtcgatcggatcatgaacatgctgcctacccgtgtttccactgaactttgttccctcgtccctggcgaagatcgcctcacggtcagtgtggtcttcaaggccaaccccaccactggtgtggtggatgaggatgtctggatcggcaagggtgtcatcaagagtgctggccgtcttgactacgaccaagtcaatgcacttgttcaggacaagtctgatgtcaataccagtggcatctctgccgacagcatccgcttgttgcatgtaagttttttctgattctaccattcttcttattttcccccatgctaatagtaacactcagaacattgtcgccaagttccgcgaagcccgcttcggtaaccgcgtatcaaacgttcctgtgcagcgtctgcttcagcagctcgatgacgagaatgtgccagtcgaatacaatattttcgagtcaactccagcacacgaacttgttgaggagctgagccaccaggccaacttctttgttgctcgtaagcttgtcagcgctatgccggagagagctttcttgcgtcgtcagttctcgcccaactctcgtcgccttactttgtttgttgagcggatgaatcgccttggcttcgaaatggattcaagcagcagtggcagcctccagagctctctctgcaaggtcgaagatgtggatcttcgaaaggtaagcacattttctgttctcccagtcataaatacatattaacacgtgatacagggtatggagactctcattgccaaggccatgcagcgtgccaagtactatgtcagcaatggtgctcccgatgagatgcgccagcactacatgctcaatgtaccggtttacacccacttcaccaacccctctcggcgctacgccgatatccttgtgcatcgtcaactcgaggctgtgctctccgggggtgccgtggagttcaatgacgatattgagtcactgaacaagactgcggatctttgcaacaacaagaaggactcggctctcaatgcccaagagcagagtgtgcacattgaggcgtgccgtaaaatggaccgcaaaagtcgggagattggcggtgatcttatcagcgagggcattgtactctgcgtctacgagtctgccttcgacgtccttattccggaatatggcttcgaaaagcgtgtgcactgcgaccagctgccgctcaagaaggctgaataccgcaaggacagtcgcgtactcgagctgtactgggagaagggtgttccctcgtccgcatatattcccgaggacgagcgtcccaagcccggcaactcccgcgctgctcaagccgcagcggctgcccgcgatgctgaagccgctagagagcgggccagagagcgtgatgaggccatgcgtaagcaaactgagaccggcacaatgtctgcggacgacgtcgatgcccttttcgatgacgacgaagatgcggatgaggtgactgaaatgacagccggtgtgtcgctcaactctgccgatcgctcgactcagagcatgccgccatcgcctacacgtaacggccaccaccagcaggcacctcaccgtactcgctcggatcccaagattgcctccggaactggtgatgcacccgagaacaaattgaccaacaaagagaagtacttgaacctgttcaagctgcgcgaggtggatggagagttcatccaggatgtcacagagatgacccgtgttcccatcatcttgaagactgacctgagcaagagtcctccgtaagtgttcccattcagcttttttctttttctagcatgggcgtccctaactaacttatttctattccagatgcctcactgttcgatctgtcaacccctacgccctgtagaggtctgaacgcggctcttttttcttcatgggatatatttcttgcatgccaccctgcagattcttcgctcaagcgaaggatgctgtgtttcgtgcacgcctacggacataatccaatcccgacgcggatcgaacatatcattatcggcatatctttccttggtcttttctcggcggtttcatccaattatcccaaattctacccatcatctttctgacgtgtcctgggattcttataattatcctgttatatgtgcaaagcggttgtttgtctttttttgagcattttagttgagactgggcaaatccgttagtgccagaccttgcctggttttctttgttctcgttctctgagaatgtttaggaacttagcaggaaggacatcacagctcgatagtctcggaaaacctttccattaatctatggtattacaaactcataaccatcatcctgggctcttcttctgcgtacaatttagtctttgttataaagttgcctatgacttccaaggttgatttgcggtaagcctactgatatggtgatgaaaatatcgaaaagattgatccatggatgtcatgtgaattattgaacaaactcctaaacaaaaaaatcagacgaatatgttgtccaagccaaggcaaattgtaaagcccagggccaccttgcccagcctgatattgccaatgcaatgtaatggaaccagctccataaagttcttctcgctccttgctccatgcagtttgtaagtccgattgaattcagaccatcaagggtatcaagaaatgtcgctaacggggtaggtagatagagggagaacaaaaataaagaatcaactcaaaacaaatccaaagtagagttatcgagatgaatcggaggtctcaaagcaacgcaagaagaatccaccaatgtcaaatcaagttccagttcaggaaaatggatggatttcttatagccgacggataccaatgcgcggctttgttctgacggcaaggcgcctgtgtgtgccgctcgtggcttttttcttggagattccagaagaggaggaccctgagagagatgacgacgatgatgatagtgacggcgtaggtagttgggcatgtgctagagaaaggggagtagagccattgggcgtcttcatggggtgatattcacgcttctctttcagcccacgcgcagttgcagatccacggttttcttttccatccccgctcagcctgcgtagagggtctggcatggccaattggggcaaatcttcgaatattggcacctcatcgcggagacggccggaggcgttgactcccccacagagcatggagagcttgggtgttttccggagtggtgatgaagtacgggaacgtgtgtttgcagtgatgtttcgttcgttggagctcatggcgggggcatcgttgtcgttgtccgagtctatgagcatcatgtctgcatcggagtcttccgggtagggaattgagaggacggagagggggcgttttcccagagcggttttacggggacttgggggcgcaaagtagacaggcgaaggggaaagagttgggttgttttctttgcttgcggtagcggggtcgtcgctgtcgctgtcgctcgtggcgttgtctgttatgggtggtgagggttgggcaaaaggatttgaggaggattgtggagaatatgaggactgtgacgggttttcaaatgcagtggtgttgcgcgtggttttcttcgttgcagctgtgtgggtacgggcgtgtttccgccggcgttgaatgattgcgtcttcttctttctcttcaagtgtggtgcctgcctcctcgccccggagctttgcttctgtcactgcagctttgaggttgagtgggatcggggcgtgaattgaggtcatgagcttggcttggtgtgcaaaggcggcatagttctcctgcataagagcgcctgcggaagcgttgagggcagagtcagggttagggtagataagcagacatgagattgtctgaatagagataaggttagttatctggagaaattcattctactgatgcagttcaacttacgaccaatacatcgcgcagagttagattaggctgccaatcccgcttgagcgtatctacacagacagctccggtgagctcctccatgttcgggtgccatattttcgtcttgaaggtggcctttggggggctcttgggatagtcatcaggcatcttgagatggagctcccataatccttgtgaaaagggtgtgcccgcggggcccgtgaggagtatgttcagttgtgacaggtcatcaccatccgacggctgcaagtagtacggcggaagatcgcggtgtaaggcagcatggtcggcagctagccggcgcaagttcgacggctaggtatccatgtcagatatagagtacgagcatacaccggttgctgggaaaccagtgtgtcaatggttgaacagggacaacttaccatgctggagctttggatggtttgtggggtattaagatacagggtaacttaagttggagaagaatgcaaattcagaaagtgatccggaccagtgaaagcacaaggatcacaatcacaatgataagagatggttacttcgtcgacggtttgttttgagtggaggtcacactaaccttttcggtagcgcgtcagtcacgtgatgattgtcgcgtaatgtgcgcgtaactaatattacccttttgggattgccctatgttccaccacgtccttactatagcccttgctatctgacgagacatatatcagaagttaggaataaaggggtaaggttatgagggtgatatctcctttatttcttcctttgaagcactctcatcaaagccccgcatgatcgatggatatctcagatccatagaggcaatcatggcaaacaggctggcaaatgtctaccgactgataaaacatacaggagttatgaagccaaaaagcgttgtatgtactcgttaatacgactgacttagtatgttgtagcttgtcatacgcaatgaagatttttgttactgcaaatataagccagcgagctgttgttgaccttatcaaacctacaggtatgatctctagacttaatacacatgatcacacaaggaatcaaaactcttatttacccaggaatgcattaagtttatcacaaatatagtaaaaagaagtgggaaacagctgcgccgtgaatatgcgcctccgagtacaacgcggtgaaacacacgagtcctacccaatgagaaagaattacaggttccatagaaaacctggaaagataataacaaaccgccaaagaaaaataatcgattttcgcatgttcatgatcctcattgctgttgatccagagactggaacaacatggccgaccgacgaccacgaccaaatcctcgcctaattgagcttgatgtggacatcatagtaaaacagaagacggggtattgccagtggccaaatcacagactcttggttcgcttacaagaaagcaacgagggcagcaccggcaaccatgagaccgacagggccggcggtggcaatagcagcagcaccggtagaggaagcagtagcgctagcacttgcactggaagcactagcactggcgctggaagcattggcactggcgctggaagcattggcactggcgctggaagcgttagcctccgcgctagtagcactggcaccagcgctggaggcactagcatccgcgctggaagcattggaatctgcgctggaagctttagcagacaagctggaagagctggaagaatccgccgcggcgtccgaggaagtgctagtggaggtaacagtggccttggactctgtgacgaaggtagtggtgccagtaccagtgacgaaggtagtggtgccagtaccagtgccggtggtgacagtggtttgagtggctccggggccggcgacgggcgaggtcagaccggcagggatggaggcggcggcctcctgtgaggtctcggcagcggcctggctggtgataacactgggttgggaagtgacaacactaggttggccggtcacgacgccgagagagtttgtctgggtcaggtagtcaacagtctgttaaataggttagcttatttcattcgggcattgtgatctgtttttttgtttccgcttacctcggtggtgacactgctctgggcgttggccagggcgatggccgagagggtggtgaagacgatggagaaacgcattttgatggattagagattattggtagatgaaatgatgtatgcgtagtgagtatggagaatgttgagggagagaaataaatgtgatcttagacaaaggctggggggaggtgggattataaggctggggttgtcccgggaaacaagtcgcatgttatagactgtttagtgcacacacatgttagaccccgaaatggcttttgaaatggatacctccagtcagccatcgccgtctgaatctagcgcaatttgagatctgcaaggtcttacagttctatttatgtcgatctctggggtcacaccaatccgtaagctcccccacgttcatttattacatgtatgtatttgagggtggagttatgagagacattcacctttacaatggtactggcatggataattaacagcaaatcactatgaaatgtgtctctctgtctcttgaaatcaaggtagaataataatagtgggaatagttggcagatttgacatggtggcaatatgcaccaggcctagctaatttagtgtcggatcacctgtacggtaagtaatcataacaaacatagccttggcgataataacgacatgtctcaatctcagccgagttaattattcagtagcgtggaagcttacttgccatggaagttaggagagacatatcattgactgtgtggacatacgagtccggtcagttcttgattgcggagcgaagcgaagcgattattctcccatctgactcactatacatagtagactaaacatactgtactccgtacagagtattaatatttttggggcttcaaatggcgcgattctattttggagctaaggagctcgaaccagccttctaagtgagacatcactttatcgaaacaggtatcccgaggtcagctctctatcctttcttctactatacacttggcattacggtatcactaaattatccttgtatgctgtaaggatataaccagttttgaggtctaatttatggattctacccacgtagtaattattccgtacactaattatctcgactttaggacttttgcctcacaaccagcccgcggactcttcaaatcaccagactaaggtgggtctttgagacaagtcagcggctcggttaaacccatccagtagggatctgtatatttatatcttttttctcttttgacaggaacaataacagattcctgcaatatcaacggggacaaagagggtcggcatatgctcccatcgtgcatggggtttaagcttgatcccagagcactgcagacggtctttattctggctaggtggataggtagtactattgacgtgcatattgtgtgactaggtcgtaccatatgtctacaatatagaagacaatacgggtataccttggtctcgacttgccttctactcatcaccagatgattctctagttataccgggccaagcatccgactctggaataaggttgcttttggctaccgtataggcgacatcaaaccccttgcttattgccctagtcacgccaatattagtggaggccatgctgtcagttgatggcctagactatgcatcgccatcctacagcggtgtggcgcgggaatgcgaaccgagtgcgccaaaagcgtctatatctggcaatgatcccacttacccaggtcacaagcagccgggcaggcgtactagtagtggaatgtttgtgcgacctctcggtcgcctctagagtacggagtatatcacacgaagatgcaagttgccacccctgcatcgccggcacatgccatacgttattctccaacttgccaagagcacaaagccattggttccaaatatcgtagccagcaacaagctgaagatctcaattgaagactgaactccctcgccgcaatgcatattatacagctctcccccactgcagcacataatcggaaactcaatattcaaccatcactccttgatcgacacatcctgaccgcggacccagtccgcaaactcctttcgcttggcctatgttatccaaatgttagcttcgaatattccaggcccgaaacaatgctgtccagcaacaaattcatatcttgaatgaatccaaatccagtagttccaaggcatgtatccaagtagatccaaaaactcacccgaatatcccagaatccgtaacgctcctccagactcaggtacgggttgcgcgctccgccgttccgttcaatctcgcccgcccactcgcgccagctaatcggcttcaacttctgcgcgctcaagaccagtccgattgaaacaattaataccgaaacgagggtttcgatgatgatgtcttgtgggagggcagtggacgtgaggctgctgtaaaggacagtatgttcgtgggccgagtagcctctgcagaagggtttgttagctttgctcaaggagtgtatataattgctgagtggatggtcggagaacgtacgcatgaactatcaggacgaggccgaagaaagtcaccacgcgggagaggaagctcatgatgggtggtgagtttggttttgcgttgcgggttggaggtcagtggttgagcccagttgctgtgaactcttcttatcgatggataattccagataaataccactgtattattggtgttgagatgaagcctggggtgactggctgtagacagtgttgtgatgccgttttgatacgttggcgttggcgggaggttcgtggaggcccgctccaggtggtttacctaatcaacttttgactccaagtggctcggatttatcatatctgttgcatttttcatactgctattgaagatgtttaatggatcggggtcttctctggttaataaggaggtgtatctccctcactacctacatatgcagtgaacgttgtattcattccttgcgatatcaacccgaaactagacctcgggacaaccctatcaaaacagacatactagactcaattgatgaaataaaccggtgtatttggctgaagctcaggcctattcccttatatgtttcctttcggttaattctgcaatgcatgggcaacacttactagaccagccctgaacgagggtaacactattcgactctgctgtccaatctctgtggttgacaaaggactttgctttgtctcgaacctccgttggtggtagccatacagatagaaaatatggtttacaagagagaggggaaacacgtagttagaccttgtaggctttgccggtctggaactagaaatatgaggattgaggctctctgaattacacggtccatgctatccacggtataattagctgtcaatagaataagccgtgagacagaacataaggagcatattccccatgtatccatcttttagttttctataggaatctgctatgggtggtgggaatatatatcgagatatcatctattacataccatttgaattagatagccaatcatgtctgttcagacgtgctttcaaatcattataaagcttgcctttatcaacacagaagacataaatacatgtaggagtcctcgtctttctaacgtggcagttgtccataagaaaagaataaggagacagcgacgtcaaagaaaaacaagtagttagttaattgaccaagttaggtgaatgtgatcgagtccatgagaatattgatcggttagaagctatatatatcttgagggttgatttgtgagacatcgagtgcataaaaagccgagcagttaccacccctgtaaatagggattctggggacttgatttgaacaattactgtctgacaatcatacacctataaatagcaagttacagtgaaactgtgaatggtcatgaattttttgaatttttcatcaatgactggtcactatggaccagctttctagttggactaggttcgtaaaggattcctttgacatcacgcatttccgtcacacaattcctgcttcataaatgggcatcgcaaatttacagcttctgcatggcagcgatatcggtggactggacgtggtcctcatcctcctcaatcttctgctggagctcatcggtggagaccttatcgtcctcaacgacaaggttgatctggagcttcctgataccgaagccgacgggaacccacttggaggcaccccagacgaggccgtcctgttcaatggcgcggacgttggcctccatctcctcaaggttggtctcatcatctggaaatgtttgttagcacttgaactggaaaagacttgaaaaatacataccccaaggcttgacctccatggtaacgatagacttggcggcgggcttgactttgccggccttcttggccttgtattcttcgagacgcttgttgcgctcagcaacgacctcggggtcctcctcctcagagtcggagccgaagagatcctcatcgtcatcctcctcctcgggcttgtccttggggttggagggaagagtggtggtctcgggaccgtagacagtgaaagctgcgttggagtcaccggggagggtggggaattcgggctcgaaagaggcaatgtgcttgtgccagcgggcaacgttggggtacttggcagcgtcaggagcggcggggaaggccttgaaggtcacgacatcggcctggctgggcgcgtggctgatgaacagagtcagcattgatgttcacatcaaatgaaacgattcaataatgtagcatagtaaagcaggatcagaggtgcgattgctcgcgattggttgtagtcatccagcggggtcttaatccgcctcctaaacacggaccaatgtttctcatcatgaaagcataacaggaaaggaaagagaggagaaaaaaggcagcgaaaatggaaggaattcatacccaacaatgtaggaccgagtggacaggaagtggtcggccactgaggggcacagtcagtcaccaattgattcgaaataacaaaatctcaggggcgcctacgagtcaggccggcatcagagacaaagtcggtgaaacccattgtgaagagaggtgtgttggtatctggaaggagaagaaaaaaaggagaggaaaatagatgaaggaggggttaaaaaggaagggattttttttgttacggaaaatctcttacggagtcacggaaaaacgtgaaagagcgaagactggtcaggtgacttacttgcgacagtgcttacctacacaagtcatgtgaccaactggtgacttcaggacgaagcttagactagtcaggtgactgactggtgacggaggtctggttccttccgccactcagcgtgtactatgtggatcgttcgagaagcctcccgatggaccttggttatcggtatttaaggtataacagtgacatgtccgatcctgaactaccctaggtttctttttacacttttttttttggcaaatctataatattcattatggcggcgagattatccctcaatgcccgcagtcggcttctgcgaacgcctcgcctatcttcgacccggcttctatccccaatcccgagatcaagcatactaccctgcacctctatcataccaccagccatcaaccatagccctatatctgtccgcaactatgccaacgggggccgtccacaccctccaggcggtactcaccgtatggatatgagcggcggagaggacgagaaatcagcactagaaaagtatggtgttgagcttacggagaaagctaaagctggcaagctggatccagtcattggacgggatgccgagattcatcgaaccatccaaattctgtccaggcgaactaagaacaaccccgtactgatcggttccgctggaaccggtaagaccgccgttctcgaagggctggctcagcgtatcgtacaaggagatgtccccgagagcatcaaaaacaaacgggttgtctcattggacctgggctctctaattgcaggagccaagttccggggtgacttcgaggagcgtctgaaagccgtcctgaaggaagtggaggatgcagaaggcggggtgatcctcttcattgacgagcttcacaccttgctgggacttggcaaggctgagggcagcattgatgctagtaatctcctcaagcctgctttgtcgcgaggcgagcttcaatgctgtggtgccactactctcaatgaatatcgattgattgaaaaagatgtggctcttgcccgacggttccagcctattctggtgagtgagccgtcggttgcctcgactatttccattctacggggcatcaagaacaaatacgaagtacatcatggtgtcagaattacagatggcgctttagtagctgcagccacttacagtaatcgctacatcaccgatcgattcctgcccgacaaagcgattgatcttgtcgatgaagctgcatcggctcttcgcttgcaacaggagtcgaaacccgactcgattcgggaacttgaacgtgacattactaccatccaaattgagcttgagtctcttcgcaaggaaaccgatgttgccagccgcgaacggcgagagaagcttcaagaagacctgaagaccaagcaagcggaggccagtaaattgaccgaggcctgggaagaggagaaggccgaaattgataccatcaaacgcaccaaggagaatttagaacgcgctcggtttgaacttgaacaagctcaacgcgaaggaaactttgccaaggctggagaattgagatactctaccatcccagagctcgaagccaagctacccaaagaaggcgctgaacaggatcctcataatcaaactctgattcacgactcagttactgcagatgacattggaaacgtcgtttctcggaccacaggcatccccgttaacaagctcatggctggagacgtggagaagttgattcatatggaggacactctccgaaaatcagtccgcggacaagatgaagcgctttctgctgtggcaaatgctgtgcggatgcagagagctggtctcagcggagaaaatcgccctatggcctctttcatgttccttggtcccaccggtgttggaaagactgagctctgcaagaagatggccgagttccttttctccacggaaactgcagttttacggtttgacatgagtgaattccaggagaagcacacaatcagtcgactcattggttctcctgccggatatgttggatatgatgatgctggtcagctcaccgaggctgtcagacggaagccttacgctgttctgctatttgatgaattcgagaaggctcatcgtgatatctcagcgctcctgctgcaggtcctcgatgagggcttcctgacagatgcgcaaggccacaaggttgatttccgaaacaccctgattgtgttgacctcgaatcttggagctagtatcctggtcggagcagaccccttgtacccaattaaagatgacgccggtgatgccgagcttccagaaaaggtcaaatcggctgttatggatgtggttcagagcgcatacccacctgagttcatgaaccgaatcgatgaattcatcatcttcagacgcctgtcccaggatgctctccgggacatcgtcgatatcagaatcaaagagcttcaggctagactcgatgaccgccgtatgactctacaggttgacaatgagactaaggactggctgtgcgagaaaggctacgaccccaaatttggtgcccggcctttgaaccgtctcattgctaaggagattggaaaccgcttggctgataagatcatccgaggtgaaattgtctctggtcaaactgcccgagtttctcttgatgagtctaagtctggccttgtggtaactgcggagaccgcggaagaataaatgacaacatgaaatctagcgttcttatgtggcacatacaatgtttttgcatctgctttttttgcgaatatttcgattgcatgtccggtcttctctcatatattatggctttgtacaatagtctattctagacaattcatattcatcaagttgcttattttatgtaggctgtaggctcgaggaacgacccgtggacaggtgactaggccaactcccaccgtttcacatccccatcattttcctctctcatcccatctctaagtatcccaattccgtgggccgcgggaaaatgccttcattaaaaagaaagagaacaccagcttcccggcatccaattacacctcgtacatctgggcgacgactgggccacagggcgccagctagtcaagccttcagcatttcaagtggtcctccccgaacccctatcatttcatcagcaagtcaattgcacacaccttttcctacagataccaagatcgaaataggtgggtcggtaagagctacagatgatgacttcgatgaccatgtcattgctgccatcgacatgaaggatcatggaactgtggggtgctcatactactcagccgaagaagaaaagatgtatctgctaggtgacagtcggtcgggggatatagagacaatcgacgctcgtgggttaattatttgttcaagtctagattagaagtgctaatcaggccatctacagtgcttctccagataaaacctacagtggtcttgacacctccgcgggttgatcttagttcccagaatcaagatccgaaccttgcacaagaagatggtacatttcccttgcactggaacaatttgaccctttccagtgcgggcaaatgctgataatttctgtctagtttcttctgcctaccttccttaccagatagacattcgtccaacttcggagttcagctactccaatgcagaaagcaaacttcttgctttaggggtttcctctgcgcacgaacaaggcctccggtttttcgtgccccaaaatggtcttgccggaccggaagaagtggacccagaagagatgggcttcacactccaagaaggaagactgctgcatatctcaagttccgttgacatggataaccccgtgactattggttgcgcgggagccatactcacttacctgcagcgacgaagagccgcggcacctagccccctcgaagaagggaatgagtatcgggttcgagcactgcagatgttcaatctacgggatacgatgtggatcaacagcaatactttcacctctctccagattatccagtcggagtcacacccgaatatgttcaaccagggacctgggaaaaagtctgcttcaggcaaagagggtctttcggtctatgggctcttccaacactttgcatacacgcctcagggtagggcaagactcaagcagacatttttccgtccaagcgtgaatctagatgcgattcgtgaacgacacgatttcataggactattctcccgccctgacaatcttgcttcgttggagaagatgaccaaagcattgaaacacattaaaaacatcagacctatcatgctcaatcttcgcaagggaattagtactggcagtgctaaggttactgggttcaaaactacggtttgggctactcttcttgctgtatgtttgatttgccatcatttgtctatgtagagtgatagttcttcattgcgatactaatgaggcgactgaccagtttgcgttctacgctatcgacatcaatgatgcactgcgggagacctcgggcgcgcacatcctgactgtccgaagcaaggttaatctccaataggtatcccagtccttcttgtattgacaacttgcaggctctcagggtctttgaagcagcccagctgtacagagttggtcgtatgattcaagaaattgtaagttccctttttaatagaattaataacgcatctgactttttaggtcgacattgataactccgaagaacaaggaagaacggtggtgaagcaaggaattgatagagagcttgacagaattaaagacagatacgatggtctcaacagccttctcaagcacgttgctctcgacattgccgcaacgattccggcgactctcgacgtcgacgtcaatgtcatttactttcctcagcttgggttccatgttgccattccactcaatgagcatggtgctgcggcgtatactagtgctgatgatgaatgggaattaatgttcatcacggaaaatcgggcgtatttcaaagacttccgcatgagagagatggatcagaagttgggagatatatacggtattatctgtggtaagcctgctaaattaatgggaagcaatggggatgaaaagctaaaaaaaaaaccctaccttgacagagaaggaaatcgagattgtatacgacttagcgcagagggttcttcgatatgagaatgtgctcgtcgatgcctctgatatttgtggagagattgataggttagtctttgtgggacatgatgtgaggtccgctgatacaaatttcacagccttcttgctctcacacagggagcaagcttctataatctgaccagaccacgaatcgttgaacaaaatgtgctcagaatcaagggtggccggtaagagctcttcaacgatcatccctcgacatctctgacagatgataggcacattcttcaagaattgaccgttccgtcctatgtgccaaatgacacattgctgatgggcggaaatgagtccgagaccaatgacgctgtttcatccataaattccaatcccagcatgttgctcttgactggaccgaattactcaggaaaaagtatctatatgaagcaggtaagctgaattttgtctttgtgaaacacattttctgacctactattaggtcgctctgattgtctacctagcccagattgggaggtatgttcctttctattaagataataatacaaaggctaactggcacagctttgtccccgcagacagcgcggaattggggattacagacaaaatcttgactaagatcaatactcaagagagtgtctccaaggtatctcaaatcctttgtataaagtgtcggattgggcaacctaacatgtctcaaggccgaaagcacatttatgaacgatttgcagcaaatctccctctgcctgaaacaagttacgaaccgaagcttgctcatcatcgatgagttcgggacgggaactaccgaaagcagtccgttcctatctagccatagcttttcgttcagactaattaacgcgtttagatggcatcggccttgcctgtggcatactcgattatctactgtgcctcgagaggccccctaaagtcattgcagcaactcattttcatgagattttcgagaacaacttcctcgctttgcggcctcgactctatcttggctatatggaagttcaagtttgcgaagaaacccaggcagccgaggaccagattacatatctgtataagtatgtacaggaatgctggctcctgggtcaatggtatgtaaatgatgcttacagttcgaacagttttcgtccggggcgaagtagccagagctttggtaccatgtacgtcctgcttcttatcatgtccgcattcctttcgaatcgattgacttcaatattggtataggtgcgcggcaatgaacggtatcgacccatctgttatatctcgcgcaaatgagtttacgtctctttccgcacgaggggagaacattattgtggcctgttcggttctatcttcagaggagatgcaagacctagaagaagcggtacgagttaacttttttataaaagaaaaatggaatgtgactaacaacctcgatacaagaactccctagtgagacattttctggagattgatttctcacaaggtgactcagaccatgtcaaggccgtcttcgaaggcctgttcgagtgaaaggatttattagtatggggccaagcgcatggaggccaatgatatcacgaatatctttacaaagtacaacatatatttacgccctaggtcatcatcaattagctgaacccgcgatgtcgatatattccattaggagaatgaaatccttgcccaccttcactgcattcgtagcaatcggggagatagtagctaggatccctgatggatcaagcacattatatacgtataagagaagatggattgagatgaataaaacggtttttgaaacttcgggtaaaccagaagatgagatcggggttatataactacacatcgaatgcctgaaactgcccgcagtgaacgccatggaaacatacacacaagaccgtggattttatgatcaagcacacattcacagcttaacactcttgaccaggtttttcttgatacccgtaagctcaccaccatatccaccgcggccctcgccgcccttgtacagttgcttagtactgccaagcttcttcttcttttcctcgtacttctttctcttcttaacacgcgggttacgcgagtctttactgcgtttcgcgtgcagacccttgttcttctggatctgatacgtgattgcacgcttgccatctggaccaacctcctcttgcacaaagatttttccaccaaggcgctcagcctcagcgtaggcatctgcacgagcctgcttgtcgtccttgcgcttcttggagcgagatgccaccatgtcgtagtattcatcgtcatcagtgccctccttggcaccctcaccgcggcggagctccttggcgacgcgacgatcctcgtcgtcactgtcaccgcccagctgctggtcggggttgagttctttgcggccgcgcttctcggcttccacattgagacgggcttgacggtcacgcagacgttcgcggtatgggagatcggcgtctccaccagcatctcggcctgctgcgttacgtttgttggctttctgggccagttgcgaggtgtagaaacggagcgagcgcttctgcttggccttctcttctgcctcatgggctgtgagggcatcctcatcaccgaagtcagagtcatcatccttgagaggtgccttgatcttttgtgtcttgcgcttccgtgaaggctcggtggccaaattctcgagatcggcgaggccagcttctgtttggcggagacgctcggcgcgaagagcttcggcttctgcctgtgctatctcggccttgctgagcttcttctgtttcggcttcttgatctcttgggtctttggttgcttctcggtcttggttttctcggtcttagtctccttgataggctccccaacgggttcctcaagctcctcgagatccttgacagtgttccaaagcttccggaatttgacaagcgatcccatgacagggtgttgtcggagttcggcaggggtcatcggaacatgctcgctagtcgcgtcgggagatggggaggaaaggagcatgaaatacatgctgatcgtgccaaggtatgcagacaacgcacggaatttcaccacaggcactggggatggctgtggctcttctgagtcgtcgtctgttgaggaagccttcaaggctgcttgttgaagatctttgaaggagctttgaaggtccacgaagtccttcgctaggggttcaaactcggggtatctcgacttcaaaattttcagcttctcatcggtgtccatatcatcagtgatctccaattgtggaagcacttcagttaccacgccagcgtcggcgccgtcctcggtacccttgccggattccacccattcagactcgtcaaacccgaaatcggcctcattcatagcctgcaactgcttcatttgtagtcgcttggcctcctgctcttcctccaatgcatcaacctcggtctcgatctgatctgcgttataaagatcctttttcgatgaaccccaggcagcaatgccttcttcatcttcctcggattctgcatcacccttctttggctgacccatatcatcatattcgtcgtcttcttctgagtcttcgagatcgtcatcctcgtctatggattcgtagccaaggatttcttcgtctgaaggctggatcaattcctctgtgacaatcagtaagacaccgttcgcacaagctcagtttatcctcaaaggcacataccctcctcggcaactctgcgccgtctcttcgcctctgggccttcctcgagtagaatctggtcgcggccggtttggaagtcatcttccgagtcgtcgaatcgctcttcgatgtcaaacttagagggctcaggagctttgttctccgctggacgaccagcttttctctttttgctgcccatttttgcgtgtataattcaagcgacaatgagccaactcgaagtctggccgataaactgtgataaaattattttttgatccctcaccgccttggctgcgctagcctcgagtggggcgtttgctctgtttgcacctttggaaatcaaaatacgggtaattttacaatcccacaacttttgtaccgtcaaaaacagacatcgggaacgatctcgggtatttccgtatcgttacacaattatttactgccccgtgtgccttccatttcgaggacaactgacagacgcaactgccaatcagccacgatggatcctcacgcgttaattgctcgtcttcatctgcctcaacttctctcctccttacagtccttgtataataatacgtccaccctgatattaggcgtttccacactcttttgcactatcattgtctatactattgccaaaatgtttggttacgggctacgaaatgagttcaatgtcgacgggcaggtatgtgtaagactacatgattaacgcggtacgttctgactaggtatgacagacagtgttaataaccggtggctccgatggtatgggcaaagctgtcgcactcgagctagctgcgaaaggcgcaaacgttgttgtggttgcgcgcactgtctccaagctggtgaccgccgtcgatgagatgaaggtcggacatcccttcataatcagttgatcaatatagctcacctattatccaggccaaagcagcgaatatctttaagcagaaattcctctatatcagcgctgatctctctgatcccgtcgagagtgaaagagtcctcgcagaagtcacaacgtggaattcaggggctgctcccgacattgtttggtgctgtgcgggcttatctcgcccgggattctttgtcgatgtgcccatccaagagcaccggcagcaaatggatgcagtctattggactgcggccaacacagcacatgccaccctgcgccgctggctgaagcccgttgccccgagtgaacagatgagaacaccccggagacatctcatttttacctgttctacccttgcattcgttcctatcgctggctattcgccatactcgcctgccaaggcagccattcgttctctatccgatactctgagccaggaaatcgaaatgtacaacggagcctatacccagcggcaccgcaatgacgccccagctgcggatgtcaggatccacaccattttccccatgggcatcctctcacccggctttgacaacgagcaaaagaccaagcctgaattgaccaagaaactcgaagaagccgacaagccccagacgccattggaggttgcaaagatctctatcagtgccctggagcgcggggagtacctgatcactaccaattttgttggtgccattatgaaaggcactgcctttgggcctagcccgaagaatagcattgtcggtgacaccatgctcagctggctcagcaacctagtattcctccaggtcattccggaccttcgcagcaaggcgttcacttggggaaagcagaacggggttccgaacggtaacagtgctccggcttcatagcgatcgggtgtattcttctagcgactgcttcttgtatgatgataccatgagcgatgtctgcatggcgcctccgaacacctaaacattcttcaattcctttcatcctttgttgcatattctttactgtacagtacaaaataatggcttgtctgttctcgtatttgtagcaattcgaacctttcattgatgtagtcattttccggggcccggactgatgacgtacgatgtagaaacaacaagcttatcgtttatcctgccaccccattttcgacctcgaaatttctttgtccccaattgcactgcccaaactggggtttaaaaagtctttgtttcaaatatgaatggcaactgatcacagatcactatttttggcacaaaaagaaattgctgggaaagcagaaacaaaaccctcgctcctccatcgaaagactcggcgatagcgatagcacaagatacaagcaaaccaccctcgagtctttcaacactgttaacagcaatcgccgcgcaaactcgtgtcaagatggaggctctcttctcaataccggtgctgtccgttttcctcattccggtcctgtcatcctacagcaccagcctgaacctcctgttcttctacatgacttggtcaacactggtactgtcgcattcccggctccgcgtggaactgttcgggacgatcgccgtgcgcgtactcttctacgcactgccgtctattgtcttcttcctctttgacatcctgaccccgtcggctgcgatcctcatcaaggcgcaaggcgcaaccggcttgccaggtgggaggaggcgacgtcgaatccacgcgaaggaattcaagatcgctgggtgggcactattcaatctattcttgggtatcgttgtgcagggaatacttgaaacgatactggttcggacgctcggcaagcgcagtgcgctcaaggtatcactgaagcttcctatgccatttgagatatgtagggatctgagcctggcgatgtttgggcgagaagtgagttattagaattcccagactatgtttctagcttgtgtcttctttggtagtcccatttgctgacattctcattctgcttttgatagctcctcacatatatcattcaccgctacgctcttcactcagggagatctcctatactttccaactggcaccggtcttggtaccattcattggctgctccgttcccattgaccgcgcattacgaccacccggctgtctatctagttaacaagttcatccccacctatgcaccagccatcatcttccgcttccatatgcttacatatcttttgtacctgctgttgatttctgtcgaggagaccttcgcatactctggatatactgtcatgccgacaaacttatttttgggtgggattgcccgtcgcacagatatgcatttgttgatgggtggaaggggcaactatggcccatggggtgttatggattggattatgggtactgttgttggagactcgcaaaccaccgacgatgagagttatgaggcagcagatgagccggatatgcggaaagcgtatgaggctgcgaagcgaaaggctgttgggtctgcgacgaagccaaggcgacgatgagacgaccattgatgagtacatgataaatcattgattggagctgtagctatgtagattttgtcttggttttgctgtttttatttggagtgtaaattgggattgttcaacatatacatgtgtgtctagaactacaatatatattcgaggaagtgagacttttggatgatatgatattctttgaatgctatcatcattcataccaacattggtttcatatgacccccaaatgaatatcattcgagtactatacaatcagtagctacgagggcatggttggcacttaaccctaaaatcgagtggcggatggctgccaagagtgattacacatgggatattagatctagaacacttagaagctcatcgcacatccatattgcattgaactctacggtgatatagccgagcagctattataacatgcatccattgattatctcaaaaggtgtcaagaagatatttatatacttcttactccgtagtccacgcctagatctcgagatctctactctagttccacacaatccggatatccacattcatgacaaggcccagcaaccttatattttagtgtcttacagagattacacgacgcttagatgaatcgaaggaattgcccaattggattgccgcctgaacctggaaatgggagttggtcatactgaacataaaagagaatccagcccgcctgctggaacgaggtgacttttaatcttttttttttttcttgaagtctttcttcataacgcagcttcatgcaaaatcagccacgcgcaaaaggaacgggtttcttgaaacatgagaacgacatcgggttgtccgaagtaaccgcaaatcataagaaaagtgaaaaacgtgttttgacggatcccgtaggaattacatgacatggttcatgaaaccgacccccgaaagtcgcgaaaggatgccgatctgcaatcgagccgcccctcgttggaaaaatggtcctccccaactatctaccgaacccgcggctaccacacatttaccacttcatctcgtggggcttgtcgccgtttcggaggctgaaggtggtagcgaggtagctgccgaggaaatcctccttcttgatggaggcaaggatagcctggtcgatagccttctggtcgctggcgcgagcgctggcaacaaccttcttctgtaaagacaaaaaagtaattagcatttcatcactgcaaatgtgatagtgtagacaagatgcgtacctcagccttctcgccctgcttgaagaaagcctcttcggtcttcttctcagccttcttgtccttggtgaagtatccgggagcggaggtcttctcaatggccttggcgtcaacaccgctgatgtcgacacgcttggaggtggcaatcacgtagcgggagttcacgcgacggagagggacaccgttgatcttgaaaggaccggtgacaaggaggacaccctggtcgagggacttgaggaggatgacacgcttgccacggaaacggccagcgaggaggatcaggatggtgccgggaacgagggtctcgcggaccttggcgggacgcagggtcttgcgaacctgtaaacacacaaagtagttagtctctgatgccacacaaatcctagcgattcccgtgaatccgcaagtatctcccatcgccatagccgcatcctccccagatgatatgcgattcgcacaagatcacaagatttgatgaactgtgtcgtcgattgacaccggtgtctggctggatgtcgccccgtaattcacaaaggctcttcctcagaataccggtgccatcgtcgcaatcatcggggcggatgcgtgccgggtcgtatgtcctcctcttttttgtgccgtcccattttcacagggtgtactgactttcttgggctgcgactgatcgtccacggggtaccacttctgggccttgtcggtgggcacgaccctctggctcttcccgaactgcttcgtctggccgtccgacatgatggctgctggcgaaggatgaatggttgtcggggtggttgttggagatttgagtgaggacttggactgctaagcggagtcggctccagtgcgggaattcgtcgagggttgtgtgtaggaagccctatcacgtgtttaaccgacagccctagccacttttggaaagcggtaacttagcatgctgatgccatatctgtaaggccgcaatatacgggcgactgtaaaaccacttatgcagaagcattgctcgacacaaacaactgacgtataccgctcgcagcctctctctctctttctatactctgtcttaacatcctcccgactcttttttttatctacctggagggagcgaattctgtcaatacagtatcctctattattggatctttgttcagaatcaaattccccaacatgtcgatagctccgatcatcaccttcaaagcaggtatctgcgacctggatgtacgtgagcttagctttccggataccatcatccggatatacccatattacattgcaactttactgacagcttcaatcagatctctagcactcctcccgccgtaaagccgaagccaaccccaggctatgtctacctttactccgaagatgaccttatccacttctgctggcgctcgcgtagcgcctcactagacgagcccgagctcgacctggtgatgatcccttcagatggcagctttactccctacaagccatccggcagggacgctacgaatggccggatatttgtcctgaagttttcatctagctctcagcgatacctgttctggatgcagtcccaatcccagcacgaggacggcgacccaagttggttcagtccccgtgacttgaagcttggagaaattgtcgatgttctgctgcagggcgaggaggttgacgtagagcacgagatcgccaatcttccccgccggccttcgggcggtgatgacgatgagaccatggaggacgtggaaggcaccgatcatgatcgcaaccgataccacagcgcaggtagcggcggcgctggccccgatgcgaccggtggcgacgtgcgtgaggagggacaagagtcgcgagaaggtggtgccgatggtggacgagcgtaggtacatatctccgacagccttgattcgggccatctaagctaatttgccttttgcctcatttgcagagcaactgccgagcaagattccgcgtcggttgtccaggactttttgaagtctctgggcggccgccagagccagagcgaatcccaagatcctgaacgaccatctacgacacttcaagaactccttccgccctcgaccacgttgcaatttattgattctgctgataccactactgccgatcaccttctgagcttcttaccgcccgcactacttctactggcccagggcaacgctgaggcttcggaagctgacacggacccggaacttgcccaagctgctctcctgtccctcgacctctcccagaaaaaagatattctccgaaaagtgcttcgttctccccaattcatgcaaagcttggccagtcttactgtagcccttcgtgatggtgggcttccgagtatcagtgaggctttgcaaatccccgtggctaatggaggctttatgcggagaggtggagtaccccttggtggtggcgatgcggtagacgcgttcctggatggtgttcggcaacacgttaaagaaaaggaatctcagatggatactgattgaatcactatcaatacatttactcggagaagagaagacattcggaaacttttcaaaggtgtagaactatttttggaaaaaagggaaccccactagggagcattgttcaagcaaggctgcgtcagcgtctggttaaaaccgttgtaattttcattccaggagctggaattggaggataagccagctgttatgtaggcagaaaataataaaaatacgatgtacgatgtatatggctcgtatcctgccgcggtatgtcagccacgacaacgttgaatatccatgcgcatgccgggacttgtcaatttttagtgcaattgcgatccgaacgcccttggcccgaattcagctttggaagcctgtctcttcttttgatttgtgttggattcacactctctttatttcctatattatacatattttctcccgtcaacacgtgtcgccaccgtgtcgtgtccgataaacccccccgtccagcctgcgatgtctgcgattcggtaatatccgatcctgcctgacgatggcaccagatagccagaaccttgaaaacgacgaaaacgctccgccgaaccacatccctctccaagatctctcaaaaccggccgatgctcccaacgagcgcgggagaagccgcgcgggaaccggcctcttctcacgacgatcattgatcgggagggggtcgcggagcaattatgagagtgttgcgaaagagtctccaatcgattcggctggaccgagcaggagtccattccaaccgtcgaaaacgagctatacagaggttgcttccccgattgatgacctgggtggtttcgcgcaagcgatgtcatcgattggtctcagttttgatggccctcaatcaagggcatcgccctcgtaccaatcagaaagccgtggctttgacgatgctgcttcggaccttgacgtcgtacctctagacaatttcgatccccacgacccccatggctacaaccccccagcagacgaagatgatacagtacggttgaccgatcctcgatacttacaaccgatgagcggtgctaccagtgtagaagggcgacgcagcactgacaccggtcactccgcgaattttggtggtgcaagactgggcgatgatcttcctcacctggaggatgggatgggaagccgtcgtggcagcactgctcgggctcggtcgcgctctttgtctccatcggcgtctagcggggctctgcaacgcgccagctctatggtcaaatccatgtcgcagcgagtggtcaatctgagtaacgaaccggaagtcgtacagcaaacgattgagaggcaggagcttgataaaaatgcacgaatggatggaccgccagtcttgcccgcgatgacagactatgacaacgaccaacacactcaaccaccccgagagaagcgttcctccagcagattatggagggatcggaacagtccattcaaaggcaggtcacttggaatcctgggaccaaatcatcctctccgactctggctgtgtgatatcctagtaaacccgttcatggagcccttcatcttgattgttattgtcatccagaccatcttgttgacagttgaagatgcgcttcctaattccacgaattcagtgaggtggggaagcagcaagtttgactgggttttcttagccatttttgtcatttatacacttgagataggctctaagattttggtgtctggatttattctcaaccccgtcgagtacagcacactcaatcgcaacctcggcatcaggaaggcaatcgcagagaagggcaggaacctgatcacaccgcatcggcagccaacgatcaagaaaacatctacgctccaggctgagccccaagcttcaatcctgcgaacatttacaggaatgaacggactagaccctgaagtctttgatgatcctctacacaaacgtcgcattaggcttgcccatcgtgcgtttcttcgacactcttttaaccggcttgattttgtagccgtggtcgctttttggatatccttttttctttcaatttctggcgttgagaaatcacaccaactgtacatctttcgcatgttaagctgtctcagaattctacgtctccttgccatgactaacggcacttcggtaagtcttccgttgcgatgatgtggctttcgagatactgaccaattacttctaggtaattcttcgaagtctcaagcgagcagcccctctgcttgtccatgtctcatttcttatcggtttcttttggcttcttttcgccatcattggcatccagagtttcaaatccagtctcaggagaacttgtgtctggattgatcctgcaggccagagcaattacacgttgaatgatccatgggacacattacagttttgtggcgggtatctcaaccagacgggtggagaaatgccatggcttaactccgatggtatggacgcagggtacagccctaaaggatatctttgtcctcaaggttctgtatgcatggaaggcgtcaatccttataaggggactatgagctttgacaacatcctgcactccctggagttggtgtttgtgatcatgagttctaatacatttaccgatctgctatactataccgctgacactgactatctcgctacggctctgttctttgcctgtgggtttgtcattttgagcttgtggttggtgaacttgctggttgcggtcatcactcactcattccaagtgatccgagaagagagcaaacgcagcgcttttgctgtgcaaaaacttgatgctgtcgacgaagacgagacagtgtctcacaaagtcagtcctctaaagcgcatacatgataaaactgagtggatttggatctgcctcatcatattcgaccttatcgtgcaagcactgagaagctcggctatgtctgcccgtcgaacgcgatttattgatactactgagactgttctcactatcattttcctagtcgagattattttgcgattcgtctcggattggcgcatgtttcatcgaaggcgtcgtaacttgacagaccttttgcttgtaatcgttacctgcatcatccagctaccacctatcaggaactcaggtcgcgcatacacagttctcaccttgttccagatccttcgggtctaccgagtggtattggctttctctgtgaccagaaagctgatcgtgattgtgttccgcaatactgtcggtctgctcaacttgatatttttcctattcttgatgacctttttatctgccattttcgctacacagctttttcgaagccagatcccagattcagatccaagtggcacgacgatcatgatcacgttttcgaatatctacaactcatttctgggaatgtatcaaattttgtcgagtgaaaattggaccacgattctttacaatgcaaccgcatacacgaccgacttcaacacagcctggatctcggcagcattcattattctttggttcattgtgtccaactttatcatcttaaacatgttcattgctgtcattcaggaaagcttcgatgtttcagaagacgaaaaacgaatgcatcaggtcagggcttttttggaacagaaacaagtccatggagcaccccaaggaaacttagcactctcgaaaatccttcgcattggccgagattccgcccgttataaagatccactcgaccatggtcctgccgcattggaaatgttgctgaaagacgccgtggtgcaagagttcctcgacgatgaagaaactaggcaacaagaacggcaaaggccgaaggactcccgaagggtgagcacgatgccactaggcgcgactcaagagactgtccaaccaggctggatctcacttctatggacgaaggccaccacacttgttatgcggagggagccaaatcctttctactcgaagctgaagttctcacgtgcttacgaggagttggatccgagaaccatggcaagagaagttgttactgcggcagagcagagaaaacgggaccagcgagcatacctcgtgaaacatcctaattataacaaatcactgtttctttttccgccggataatattgttcggaaattttgtcaacggattgtcggcccaggacgtggcagccaacgagttgagggtgtggatccatacaagccactatggtatgcattctctgctttcatttatgcagccattgttgccatggtgcttctcgcctgcattacaacacccttgtatcagcggcagtatttccgcactgaccgcaactggttcgtctatactgacttgggctttgccgttgtgtttactattgaagcaacgattaaagtgattgccgatggtttcttctggacgccgaatgcatttttccgcagttcctggggatttattgacggagtcgtgttgatcacgttgtgggtcagtgtcggtggctcgctcaaacaggactggagtgtttccagagcaatcggcgcctttaaagcgctaagggcgttgcgtcttttgaacgtcagtgacagcgccaaggacaccttccactctgtcatcattgtcgggggatggaaggtcattgctgctgctgcagtttctatgagtttcctcataccattcgcaatctatggagtcaatctgttcaacgggcagatggccagctgcaatgacggtgggttttctgggaacttgaccaactgcgtcaatgaatattccagctcgccatacaattgggacgtgcttgctccacgagtggcggggaactcttattatgacttcgacaatttcggtgactccctcttcatcctgttccaaattgtctcccaagaaggttggatcagcgtacaagaaactgcaatgagtatcactggaaagatgacccaaccacaagatctagtggcaccggagaacgggcttttcttcgtggtattcaacttacttggcgccgtgtttgttctaaccctgtttgtgtctgtgttcatgcgtaattacacggaacaaactggtgtcgccttcctgaccgccgagcaacgttcctggttggaattgcggaaacttctccgacaggtatcgccctcgaaacgatcttttgatgacgagagcaagaaattgcggctgtggtgttatcgaatttcagttaagaagcatggccggtgggcgtggttcgtgacttgcgcccttgtagttcatctactattacttgtgctggaatactatcccgaacctgcctggtgggagatgcttcgaggtaagtttttggccagactcgaatgttacatgttattaattggtcaatctagccattatattcttggcattcatgcttgtctacgttgtgaatgtcttaatccgactaattggtcttgggtggcatcgatttagccggagttcatgggatctgtactctctcatcgctgtccccggcgctttcatcagctccgtccttgacatttcataccgcgaaagaactcatgtcgtggtggagctcaacaagcttttcctcgtgtctgttgccctgctgcttatcccaaggaacaaccagcttgatcagctttttaagacagcggcagctagtctgtccgtgattggaaatcttctagctacctggttcgttctattcttagtgtttggcattgcgatgaaccaggcgtttggccttaccaagttcggcgaaaatgaggatcacaaccagaatttccgcgatgtgcccaaatccctgatcctgcttttccgagcaagttgcggagaagggtggaatgagttcatggaggactttgcgactatgactccgcccttgtgcacacaaaattccaacttcctcgatgatgactgtggaagtgcgccgtgggcccgtactcttttcattgcatggaacctgatcagcatgtacatctttgtctcgctgtttgtttcattgattttcgaaagtttctcctatgtttatcagcggagcagtggactgtacgcgatcagtcgtgatgagatccgtcggttcaagcaagcgtgggccacgtatgatccagatgggacgggctttatatccacggagcggttccctcgcctactcggtgagctctctggtgtctttgcgatgcgaatctacgagggagagttcacggttggaagtatcctggaaaaatgccgggtcgaccctcagagaaactcgataggttctttcgcaagaaattcgacggtatcgctggttcagccacgacaatcaatgtggccgaactctcgtgtctcgtctggtgtagatctcgacgagctcagtcggatcatatcgcggattccagttcaaagcatccgagagcggcgcagacgattgaatgctttctacgaagaaatccttgtgtcagcagatcccgaccgcggtatttccttccatcagtgcttgatgattctcgcacattacaatgtgattagtgatagtaagagtctgcgcctcgaggaatttctacgtcgtcgggcacggctgcagcgggtggaagaggctgtccgtcgaaacaccgtcgtcggcttctttgataccctatactggtcacgcgaattccgccgcaagattgaccgcaagaaaaacggccggttgagcattgtcccgacattcactgtgccggagatctttgtcgacaatccaggcgacgaccccgaggagcacgaccagccaggttccggtgcaatgactccacggacacaaccagacttggatgcaaacttccctcctatgctctcaccggtctccttgcaccacagacgagcggagtccagcccaactggaaaccgcagtgctctgcctcgcctcaataccaatttgagcgggtcagtatctagctgcagcacacctacgagggagtggtcgagtatcagtccttcaatcacaccgcgtcaaatgtatggggagcacaccccgctcgacaccagcgaaacacacgaggcgccttcggccaccgatacttcgcgtcatgtacaggatgttatgcattctctggacaactccgcctggggtgagagtatccggcgaagctttacacagcggcgatcaggcgatcacagttctgaatgaaatgctgtgcctattgatgtgtctgattttggatgttatcatgaagtgagtggatagagcgtggtttggttttctactcttttttctattctttagcattcccctcgaatagattggggattttgtctatgttttatggcctgtttggcccatttttctgatttttggtgctttatactactctccttagcgtgggagcattttgcatagcagcggcgtgggattccatttcaatatttttccatagacttggatacacgattgattattgcatatcggacattaaaagagacgattattccaactatctatagaagactgcatgggccaaagtgggtcggattggttactattggcgacggaggagggaatcgagaaaaagatgagatatgaccgtatatggctatgaatacatctacttttagataagtacatacctttacatatggagaatacaaaactagcaaaagaagtccagccctaaagccattgtgtatccgtttgcagggacaatcacattcatccgcatgcgttcacccgcgttcaatccgtgtcttaaccctccctgcagcaatagtccttgcagtcaacccgttataggattcagaaaaaaagtaaatacctaggacaattctctattcttcgctctacaaataaccaattcaatcctcgtatcctgctctactatgacatagtccaacaatcaaatcaaaaacttcacaaaagcctcacattccataatataacaaaagcaacaatgcacatcgcctcgccatttctctctttgagcacatctttccgctccagaagccccaaatcaggcagcgacagctcgagcccaagttcaacaacgacctcaccaccctcctctccaacgtccacccactcgccccagagctcaccacaccacctgttcaacctatccttccacacctccaaagcccagcacatattccgagggcaccccgacagtgccaggcacacaaatactagccccggaaattcagcccgcccccgcccggcctccgacggcccacacaattccaacgccgtcagcgtgctcccctgcgcggtcctacgtggccgctcagcgatggttatccgccgacgattgtctaagatcgacctggcgctgagtgaagagcggtcgcgatgtgacgaggacgctattgagcggcaggggttggggctgatggagccccggccggtggatctggggattggggaggtaaagcctaacttcgtgatgggcggcatctttgaggttatggaggggcgggcttaggctttactttgttttctacaatattgttctttctttctttttctttttcttttttttttggtttatgctgtgatactctatttgttttaattgcctttgtatttttcatactagaagttggattgtctgcttccggaaaggaatgtgagatacaagggaatatgtatagtggctcgatattggatatatgttacatattttttggttatatttgagcccttgcggaactagctacccaatattcaatgtctcaaggttgttttgcctaatatcgttcatgtctatgtccctagctaatgcatagtactttctttttaaggttcatccattttatacttctatcaagagtcaaatgcaaaagcgggtaatgccggaccggactagcctgcattctatactccacatctttctccggggaagggctagatcagcctggagaagtgaagcatcaagccccatgcttggccctaatctccggtccgagaaacatagccatagacttccggagaagaccaaattgggggccattttgcgacacttatcttcatttataattcctcccttactaccctccccgtttgcattctcggcctggccatgatcgcggaagcagccctacggctttcatcttctcctagctatccgggatccctgtatgtccccgagcaactcacttcgtcctcgaccacatccacaaactacctagtgctgtggtctgtggagcaagggtaggtacgagacgggctgccgtaagccgctggcccctaacaatctgtagctgccatgggacccttggttgattgttcaggtctatcatcacatacctgcctgctgtggcatcagtaaatggcttatatgtctttcctgatggcagaaactagggatggttataaagttgttgtttcttccagtgaggacgtggtatcagtacttttcttgtgcttttattccggggagcctggggtttttatatgccgctttaacccatgcatatgtggcctcttgactcattgagtgctttgcagcagattaggcacctggttccagcccaaactggactcttccagttcgcttatgtaatttattcctggacaagccctaactagttaactaactagttagcaaccgttaactagttgactagacccccggttcaagggcttataaatatgaaatccattcgaaacatgtctataactatacctacctaggaactaggtggtcatgtatagatttccgcacgacccactgcccactgtgcctagtattgctagggagtcaaattgggtcacaagctttgggtataattccgctgatttcattgtcgccaagaccctaattcatgcacaaattgagtggaactgagggcccaaactggggttcccgggaccgtccctgggtctgggagagcctggtctctgactctctgggttgggcctaggttgggcctgggtctcgaccctatatttgcaggactatcctcttaattcgtctcccacggaccacaggctacggtcccacctcgtctcctaactcgaccgtcagtgcgccagccagctagaactttttatacttcctttactctatcgaaatactagattcagctatatacccacttccctcttatctattggataggcgaggatgctacgtaatgaattatgagagcacgtccacaagggctaagtcaaaggacttgaaagtagtttgaaattagtctttgttgtttgttatctgttgttaattatacataattcttgtcagggtattgtgaagctaacatatggcaaaggcaaaaaaaaaaaaaaagatgccaagatgaaagagattggaagaggcgccttatgcacttgcgttatggtcatgattgtgtaaaaacgccaagtcgctaattagacatgaatcatgatgggggtatgaaaaatcgcaaaagcagaaaagcgaggatattagcggaaggaaagcctaattaggcttggatccctggcccttgcgcttgtttggccataattgacctcggcacttactttcaccacacaggcactggacagcctcagggtcaatcttttgaggagttgtgttctcctcgccctgattatagtcaaaagttaattcagtgccggagggaatgtcgttgtacgcgaaaaatgcaaggttgtacagatattcgtcggcatgattcgtggtgcaaacagggacgatcttgcaattaggattgcatgagtggttcataaaccgagttggcgagccaaacttgcggccgtcgacgactttcatgttttgctcttcatcgtcgtcatccttcacataccagtccaaagagaaaaggtatgattgcgtatgagaaccatcggtgaggctctcgcgctcgtcagcttcaagctttgtaattacctcgccgaggtagaggtcgatgaattgcccacggtgaatcaagtcaggggaccgaagacctaataaaaatcataattagtacatatataggggaataggagtgaagggagacgaaccaaagccccgagctccagtgtcaaagatctccagtctaacagtccttcctttctgaacgacgtgattccagcatttttttccactgcagccacaacgggagttgcattcatagatgatcgccttgcgattaaggaaacttttagtcgccacaatcaatttaggattgctttcgcagatctggtaagggacgattcgatcttctgaatcttcttccttgctgaggcaatcgcattcgagtcgattgcagccgccagtttcagtacaagcacagccgatgttgaattcagaatcatccggaatccgttcaacacctgcgcggtactgataactgttgacgaactcgaagttatcggctagtttagcaagacgctttggggaatcaactttcggaatgaccgtaggcccattgatgcgcctaagcttctcgtcaagagtgtggcggagttttgaaagataattttgttccgtggacgatggtgggttgagagtgttgagagccgagcttgatctgaatgacaatgcgacagaacgacggtcaacacgagccctagaagtaggatatgcagcttttgtaactctttcctcttcgtcggttgtaggaaatatatcactatccattccattaactttagagacatctcgcgcgattgcgatctcccgcctttgctttgctgttggtgatggaatcacaacgctaatgtgagatggcgttatgcttggcgctggactcagcgaggatggacaccacccggatggataagggtgagcatgtgaccgcctatatcgtgcaaacttgtgaacatcgctcgacgatgacgaatctgaggtatcatcagatagcgatacctccacgcttttccttttcaatggcacagttggtggtcgataagttaacgttgtcacaaagggaagtttggcctgaactgatttctttggctagaagtgatgtttagtaaacaatccaagtaggttatgtacgtagtgccggattgccggattgccagattgatagtgagataaacagttggcttaaggggcgaagggaattggaccagacagagaacggcatagtggggccaggagaaatgtagtgggctcagtctttggaaggtcgaggtgaacgcgaacaagcacttaccagctcagaattacccaattcaatctcattggttaggtcaatgaacactcggttctgattagcccccgagccagggggagcgcgtcccgccatctaaagccacgcgtaggtgcggtagggtaaattgtaacaaactaaagaacgcgtgcgaaagcgcgtcgagcctcgcaatttcaatccctttcaggactggacaaggagagtgttggagaacaggctgctaagactattgagatgcttggggtgtcgacgagtcgaggattctagcctaaagagctaggtaaaaggaatcccggagaggagattcgagaaaacaacgtctggagatgaagaaaaagggagaaacaaaatctccaagaagcgcccgtaaaactaaaagaacctagaagaagatccaacgtctgtggcggatgggagacgtgatagaagatggaggactggaggtggtgaagaggtgaggtcgagaaaatgaggacggcaatatcatgtggtggggcaatatatgctgactcagcaccttggtccacattacctaaataggcaatgatcgccatgtgtgttagcgtctttgtggcctcaattcgaagagaaacatgtccgtattatgatttttgagatgctcatgattctcactatccaatgaattgattttaccttgtatgtttccagtttgctgtgttttgggttgatggggtatttcggttagcggctgctgattggtgatcaaaagggagttgtcaggaagtgcgggaacagcgccgggaagaattatgggtctttatttgattcccatagcttccaggcccgagaggaggctagaaatgcaggggaaaagctccaaattatagagctcagtgcctgctatcgattgatatatttatcagctagattagatgtggggaacagcgtataccgccgtctagagagctttgaagttttgactgttgcaaattcttggcatcaatatcggaccatgcgggccgcagcggacctcacttcatccaatcaacgcgctacgttattgatgactcagcgcagggggtcgcctattttggagagatttgatagtataattatctagaatcctatatacgatattataaacgggttataggtcggattattagcaatatgcaggcgtcgcgtgtgtataaagtggtaacctctaggtaggattagtaatatattagtaatcacacgtgacggatctgcacaacccggaagaaattccggtgcatccggtcgacttttagcttaccaggggcgtttggctcccaagaaatccgaaaggctgtctttttggcagactgtgttaaaacttagggctcagggcccaggggctagagttggtgttgaacttgtcgcatgggcgcaggggaccaggggtagaccgtagaagtccctagtcacataggcaccgttctcccattaccgatggccgggaccggggactccgggtcccattaatgatgtcccattgtcccatttgcgatgccccgttacccgcccccgtatacgatctcgattctctcgttttagatctccgagtacaaccatttggccatggctcttaaacacacagccatgcagtcagtgacttaagtcttcaatgttcatgacctaaaggctaaagcccaaatcacccagtactactccgtagtaagagtccataattatagaaaatctaaagttttggtcgccccgggccctacttgcaatttataaaccgaatttttttcaaaatcctctaagatgtaatgaataattttgcttatggagaagctctgtctgtagttaattacttttttattcggtttatttaggaggtatcaggagctctgaagatttagcgatcttagttgctcgggggcagtgttcgttttcgggttacttccgccaactgaccagttcggtcgggcgcccgggcgcaccgacatacccccgacacccccgcctgttcctaagttcgggcaggtgcgggttacacaccaacttaactggcgggccttggaccccgagccctgccgtgccacggcccacaacagcaggtagtgcacaactgcggccctctgcgggtggtgctcctggtgttcggtcccactggtttaccggtattagcaacgaactattgagttacggagaagatcgcatggtttgtatcagttgggtaatccaacaacaagtactattcagtacgggggctgggaatacctatgagtgcaaaatcggtcccgtgatgggccgtagatgatcacatgacaggggtctaggatcacactatcaaattgacattcatgtatttaccttgtataccctctttttcctttattgcatgtatatgcttgacttcgtgtaaaggatatgtctgggcgcacattctcctgctcggccaaaagaccattatatcagagctctcgctctggcatgtctaggaccaatatatatatatagtactgcacaagttatctgtgacacggctccggatatctcctttccattccattttaagcatattagctctgtgcgcaatacttctggtgctactcgctaccgcaagcagaagatcactcccgcgaaggatgtagctttcttggtttattcttccgggactacgggtgtgcctaagggtgtcatgctgtcgcatcggaatatcgttgccaaccgcagccttgtccgtgatcgccagaggttgatcggcaggatcgagggacatctggtagttctggtagttcatgcagggctggcagatctattaggttgaccaagtattagaagcagccaaagtgcgtagctcaagacagacctccgtctacgtaaatacatatgccaccatggccaggtttgatttcgagcccctagactagaatttagggtgttaacgctagcttagctggattgtcaagcgatatctgatgttggctcggcctcgacgttcgatctagctattttaggccgaagtcaagataaagttccgtttaaagacctcgggaaccaccagcaaccgaaccatggtccatggataggtgaaggccctgtatgtatgacctacacgggatgtggggaaagcaagccaacatacatcgttgaattacaacaataacaattgacttgaacttgtttgcgcagtatgcgatagcttacgaccaaagaactctacggaaaattgccgcaaccattttgtatttgtaggcacaacataaagttcataatcaactgtaggtacaacaccatccccctaggccacaacagcaatagagaacggtggggaaagcaaaagctaaagcaaaacgctagcaaccaaatcattctcactcgattctagtgtacaccatgaagaccagagcaagtctagctaggccaatgagtattgaaataggcgagcagtacttaggttcaggacgaaaagagcaaatgacgggctaatgaagataaatgatccctctatgagagacgggaggaaagcaaggatagcaatggacatgcaatgataacggggcagaatcgatgaatactcgtgtgtgcggatgcgtcgtaagtggacgtaactcaaaacaaagcgaataaatcgccaactatgtgccacaaagacaagggaagggggtcttggcatggaatgtgctccttggccaaggatcctacgtcaaatgggacaggtcacagtttcaatgcatcgaggatcttcttcgccatctctcgatattgccacatcccgcctgatacctttttgaattgaataccatggagggagaacagaggtaccttcacgatcaggatttcaaatcgaaggacgaggttctctccggtgtcgctctgtacacgggtagtggtttcgccaaggacacgttcgccgaccggaccaccatgttcccgtgcaacatattcatctgagccgtccgagttcgtggtgaaactgcgatccggcgcagcgtgagctcgacgatgtctagaggacccagtgcggctctcgtctcggctatcctcgtggctgaggaggccgccaaagctgatacgacggcggtgccctgatacctgcccctgtcgttctggactggagggggcaacatcaactaccttgtcgaggtcgatgctgggggcgtggcggcagctaaacccacccttgatctcgacatactcaaccgcgagctgcctcaggacccgaataatgtcagcccggataacgggcaaaggtttgctgctggtggtggagacactgaaaagaccctttaggaacactggtttggacagatcttctccctcgttggcgctctccagtgccgttcccgcgccagaaatgtcagcatcggtctcttcgggcacattggcctctcgggtagcgtctcgccgggcccggcgtgcctgaatactttctcgccgagcgtgtcccagcgacatggtacgcgccgtatgcgtgcgcccaccagtcctcgcgctggccggaactttctggttattcggaacaacctgatcagagtcactggtagacggcggttgacggtctgcagtaacgtccgaagcatctgcatcacttctccgtccggctctccgagttcggtagtctgccgaattgacactggtagatctctccaggaatttgttggaccgtgcattgcgttccgattctggcgccgctagaagatcctgctgtggccggctgtcattcgaagaggtctcgcctggagatggttctgcccggcgagttctccttacactgaagccacggtgcatcggagatgctgaatctgcaggaggttggacattgagtgtgggtgtgttgggagtgctgatgcgttcacggtccacatcgcggctgcgatctttggccctgcgagtgctaaatcgtctcaagattccagcagcagtgctttctttcttggcaggtgtgtcggggtgcgaggtagggaccgcgtgcgcagatggcgtggaagaatggaatatcttcaatccttctgaggcttcgtcttcgccatgagtgcgggcccgtggccgagatcgtcgtcctgtatccttgtctcctgccaactggtactgattggtgtgggcggcttccggaggccgcagctcaggcacctgaacttcactgtgggtttgacgaagatcaagggcaccaggtcgtgcttcggcccgctctcggtcaagtttttctttgactagatgatatgtggacaccaacggactgtaagcatttaaagggtcgttgcccagttgcacagcctccgctgaaggggcggaaagggtatcacgactggccgcagagtttcgtcgtttgtagaaatcgaacactcctcgtttgcgctctgtgtgattggaaacaggctgttgtagttcgcggaagtacagccggatagcatgttggtaatcttcggactccaataccttggtcaactgagctgtaatgtactccggaggcccaaagtcaaacccggtcatcttttcaataacctctggatctagaggtagctgtaatggctcacgctgggggaggtaattctccggagggttactaaaacccttgttcatccagggatggttcatgatctcggccaagctagcacgctgcttggggtcagtgaccagcatgcgggatataatgtgtcgacactctgcgaaacacgatcagcaatggaattagagaaagcatcctgcaaagttgacttaccagcggtgagacctggcgggtactccaccacacctttcttgattttggcatgcagctgaggcatactctggtcatcgaaaggtaccttcccacaaaccaagacataaaggacaattccaaagctccaaacatcaacttcgggtcccgtgtattgtctggcctgaagcaattccggagcagcgaaatacagactaccgcagaatgtcttcagaaggcttcttggggagaacaagttgctaagaccaaaatcaatgattttgatatcaccggtcttgctgataaggatgttctcaatcttcagatcgcgatgcacgatgctgttacggtggcagtaatccaatgcgctggcgatctgtcgtgcgaacttgcgtgcttgcttttccttcagtttgccgtgagagatgatataatcgagcatttgaccaccattgacatattcaaacagcatgtaccaatggtatgacgttcgaacaacgtcccgcatgccgcagatatacggatggttcactaggctgacaatggcggcttctcgggctgtccgaatctcctttgagcgatcggctctctctgtctcccgagtagtgcgatgttcctctgtcgagagtcgtggcacgattttaatggcaacctgcgaccgtaatcagtattgttttaagacaacaaagagttgaatatttgtacttgttctccggtctccgtatttttggctaatttgacttttcccatacttccggcacctattgttttgcctaaagcccattgacccgtcggcgtcgtgattgtagtccgtcgcctaggcgcggctgcggcggcgggagcagtggttgcggtcgcatgctgcggcggcggcggctgtgaagccgagcttggtgtcatatcaacactgtctcgtagacggctctgcgatgaggggtttctttggtgtcttcgggcagtttcggttcgagcggtagaggggcgttcctgagatcggtccgatgacgtttcccgacgagaaggaatgcgcgcaacattagacgcctctgattctcgtcgggctacaccctcgagtgcagaatggtttgagggaggacgccggtcttcggaaggagttttcgaatatgacaagttggttggcgtaggaggctgggacgtattggatggtcgaactgccacactgcgcgtccgatgggggagatccgatggggctcgagaaggacgagaagtagttgagtggctgcggaccacagttggtgcgttagtggtcggtactgacattgtggatggggctctctttgagggatttggagcggtcaaaggagtggggagagatgagggaagccgcagccaggactcggcccgagcacagttctagcggtgcgaggagggtttcacagaatgaaacaaatctcgtaacgcgaacgcgatgaaagatggtgatactgaaaggacgagatggtgggggttaagagtaagaggaggttgggatgcggagatcatctaggggcgacacttgcaaggttggtaactaagctctcgagttgatacccaaattctgtttgaggctgggcttcacccccgattatgccccttttttttggagtaattttctaattctttagtttttttttagcttactgtttattttctagggaacactattgacatgcatataaatgctactgtgaccacgtcaccacctggctacgtgcaacgctgaggaactggaactactaatggaacgttcattagccatggtcacgtgtgtccaggtactataaatatctcgaggtcagggtacacaacgttataagtctgcatttatataatggaatattcaaaaagagcatggctgaggcgagtaatgagtatatcaccactcttttggtccgaaagtctctccatctgcgacagtctttcgaactgccgtataaagagagtcctatgttcctcgttaggacccacgtcaataaatggcgggatatagttacgtaccatggtctcgtatggagcaatatttccccaccattggggtatcgagacatttggcagaataatcgcaaagaaaataacaatggtggacagaatgaggcccgagtcaagtcctgcggcggtgatatagttgtaagtatgccaccaaccgccccatcggcgtcgaatccagtagttgaatatgaggccaaagataacccatgaagagaagctcaatggggtggccctgtgaaatgatcagtaagaggcaaccgtgaacaatagcatcgggagtgttgtagacttacggaggcagccaggccatagcacctagcatcctattgatacaattagcacatttcaccaaagatgagcttccgcgacttacacaggtgcgtttaggaacctgagcttagaccgagggcgcattcttatcaagacatagaataccaccggaagaagagcaccaatcaaccagaaccattgtatttgcatgtacatgccgccaggtccaaacatacgtcgtggaccaatgacacctaaataagaagtcagtaatatgttgatacatccctgagatagaacaaactgaccccacacaatgctggatgaaaagaatgctcttccattcgggcatgtaaaattccccgactgagtactattttcatagatggttaatacatgttctctttcaaagatgtgcataacatacgttgtgcaaacttcatcgatattgttcagggtccagttcatgactgcaatctgaacaatacttgcccataccgttgcaacaacttgacacataaaggtgacgcggggtggcactttcatataatgggccagctgttgttgaagaaaagtcaacaatttggtccactgacatggagaggaagtcccttactttgagatccgaacagtatacttgactattgacaaggtcagtcactattctgggaagagaggattgaaccttacgcttgtcccaaggtgatggtgctaaagaccttgaataccatgaccgcaatcggctttcctggaatcatgaaacctgccagaaaaggcgataagacattgagcgctatataaattagcgttgcacccacaaaaaggtcgagaccgcacgtacaaagcataatattggtgatgccgaggatcacgcaagtcggaatctgttggatgagtcagaaagaaccttccagtggccatgacaaaacgtactataaagacgacggcaatgataattgagacaaaaaagccccaccctatgtttgattagatttgatcatcagatctcgaggagtattgcatacaagggagctgcgaatcatatgccagaatgcctgcaagccctagtgcgatcgagcataggaatagtgtcgcataccaccagtcgggggcttctttgtactttttcatcatgataagatgaatgtcgggttcctgattccgagaagccctgaattgatgccatatctcctttcgatggaagagaataacatgtacaatagctgctgtaagggccgcaaacgacaatccgtagttcaaggcaaatgtcggagctaggaacatcggcgaatatgccttgtatttttcctcatcaaaagagaaaccagaacctaggattctggtcacattataggcgctttgcgtgttgtcataggtgctagacgtgttgatagggagataggcggagtacctatattgtgtcagctttgaaatgattgtggtgagatgtttcagcatacaaagccccagagtaagagatcccgattgtggtgatgattacaaaaaccacaagcccgatgaaggtgttgacaagagcatggacaggtgccaagagtggatctccgagatatgcagaaacatagctggttgtaattagctttacatctttccagcatgtataccattgacgggaatcttacgtccaatcaaacgtgataggaatgagggagagtcctgtgaagcctccgaacaactggttcaaaaccacattgttgggtcggatccctacaggcaaaaagagtcaccgcaagtcaggaatgaaacgagtcaacgggatcttacatgtgacaaaagcaaacacagagagtccttgccataggactcccggtaccctgcagttcgaagaaatcagtatatgcagttcaaattagaacaagatagacttaccaataccagataaaagacccaattgtcacatatagaaaatatcggtagcgtgaaatgctccatccgtgggtctctgattcatccgaggagctccagtcgtgaagagcataaaacagggaagtgttcgcaaattgactaggccacatcatagcagcgggccttgacatcgtgagtttttggggctcttggcaggaaaggttccaacttaccagacgaggaaacggcggaaaatgcctgccagggacataccaattacctgactgctcaaagcgaataatagttggaaaccccatccaagttccatattatatagtgctggaaagtgcgttagacaatattgaattgacgcagagatgttgcttacgcttcgctttcaatgccaagagggcatctgtacaataagcatagccgatcgacacactatatattgcttagcattgatatcaaagtttatcaagaactaccgactttgccatgatctgagaacaaaaggtcagcttaattgatttgaacaccaactttcaagagcttactgtgataaccgcatgctctttgatagtgaacggaccagtattcaacgtccatttcactccaaatgtattgaacttccgagtcggcattgtcttggcccacaaacaacctatcggatagaccagcaactgaacgacaatagcagggaacgagatggcagggctcctaatacacgatgagtaaattatcccctacttatagaccgcagaaccaaatctcacctcatgctcagaaacatattgagaccacttccaagagtagtgaagaacatgcccagcacccacgcgcgcacggtgttggcaacttctccgccatctgagttgcgcaccgcggcacgaacagactcatactgggactcatgggcgagagtcttttctaactcgagggccctctcttgatcatctgtcttgactgcctcgttgatagcatcaatcttctcctgtggcaaatttggatcccactggtgggagagttggaccttgtgtaactcttggatcgtattggttactgacttcttatcgtttggcatgtcgagctgggatgggtcaaggccctccgtgacaggtagatgcgaactcattctgcaacaatagggcaacaggtaacctggttagggtctaaatgagatatcggcttagagttaaaaacttctagacatggcagcagggctggaataaatacaaaaagagagagatgaaaggagatattaaaggagattatctatcacagcaaatggccgaggcctatactccgtacaaagcatcagttgagcttgagttttcttatctcaactaggaaatggctatactaccaatgtaggtgtatgtatgtagacaagtccaacccgagccggatcctgttgccggtctagccgttaagatgataagtttcttgaaagacaatgtagattttgatttattccccgcattccagccctaatcgcgcttgctattcttccgtcaagataacaatctacctgctttaggtataaatgcggagaaaggccgcgcaactttatgagctagtttagtccatgcgatatgaacaaaaaccaaccattcggaccgatcagcgacaggggatataatgtcggagacaccacccgatgtagtaacttgtggtaggacttattcattttaatctagggcgctacaatggtctgtgttcgtttacacaagcctatctttttgtttttctgtctagtcccaggaaagagtttcttatccatttcacatgtcttcttgttccgatttcctacccctgggagtcaatttaaacaaagatactttttttaaaacaaacaacaggcaaagtttagctattttcgagcgaaacagagcgagccgcattctgcctgacatggtatctgtcacgtcacccaggggcattgccatccagcgtgcacaagtcgacacaatacgcgacaggattgagcgcatcaccgaggacctcaaagatatcaaggaatttttccccatcaagatatctccgaggagaacacaaaagttacgccagttccttacatccgagctcgactcactccgcagccagccctttgatctttatgatcagcaagggaaggtagattatattctcatgaaaaactacctagaaaggcaactccgcgagttggaactcgactgtaaacaggatgaaaaaaccgcactgcttctaccattctcaggcaagctgctggagctgtgtgaagctcgcgttatggtgttatcgatgaatgcaaaagatgctgcccagaagcttgttgaatcccaggctcaaatctcagccgtgatagacatggtcaagggcgattcgaccaagttccggatggagaaaacaattgcatttagagcggcgagaaatatagactcattgcacgataacctgaaagaatggttcgaattctacaaaggctacgatccgtcgttcaattggtgggtgtcacatccatatggggttgtggaaaaaggattgaaagatgtctcagcaagtattcgagagaacttggctggcatccgcccagacaacgatgatgcgatagtgggcgatcctatcggtcgagaggggttgcttagcgagctcttgggtgaaatgattgcctacacaccggaggaactaatctcgatcggagagaaagagttcaaatggtgtgttggcgaactgaagaaggcatcacgcagcatgggattccaggacaattggaagcaggccctagaagaagtcaagaatgattttgtcgagcctggaaaacaaactggattagtccgagatctcacggtggaggcaatctcctttgtcgaagatcaccaactcgtcaccgttccgccggtcgccaaggagaattggcagatgtttatgatgtcgcctgagcgccagaaagtaaaccccttcttcctcggcggcgagtgtataattgtctcgtatccaaccgaccagatggatcatgaagccaagctgatggggatgcgcgggaacaacatccatttctcccgcgctacggtattccatgagatgatacccgggcaccatttgcagatgcacatgatcgcgagatacagaccctaccgccgcctatttgacaccccgttttggattgaaggatgggctctgtactgggagttcattctgtggaatgacgaacggttcagaaagacgccgcagaaccggatcgggatgctattttggcggcttcatcgatgcgcccgaattatattctccgtcaagttccatcttggccagatggctcctgaggagtgcattgatctacttgtcgatcaagtcggacacgaacgtgccactgcagaaggggaagtgaggcgatcattaaatggcgattattcgccattatatcaggccgggtatatgctgggtgcgttacaaatatatgcattgcggaaggagactgtcgagacggggcttcttgctgagaaggaattccatgaccggtttttgaaagagaattgtatgccaatagagttggcacgagccttgatgcaggatcaatcgttatcgcgtgagcacaagccgtcctggaagttttattccttgtagaaaatattttgtcgcggtgagcagggtgatgagaaataaatgaaaatattgttgtctagttatatatcgaagagcagtctgaccacggtcggctagcaagcatggggattacacagaccgtagtagacatccttatctcttaatgcagcaacatcctataagctcccttctcattctgtgagtggtgattggactgtcttctccccttcaggattctggtgcacatgaaggccccgagattttctctctgcccgaaagataaggccactacttgaggattccagctttccccactgcaatatatatatttccatgaatccaacacttagccaaagcacaaactacccatatctatgttttggcctcatccttgaaagccagaatagcccctggttttcgggcggaagcgtaatgacttctctgccgaggtaggttaccataattgaaatcttccttgcttgaaaccccaaagacgacattttttacctcagtgaggaactacaataacgtacaggttggagttaatgtgtcattatcattggtggatctagataccgggtgactcccactggccgagctgtgcttctaaacgtagtctatgtaagcaagagatgttggaggcgtacgtgggacactcggatgaactacgtcataggcctagacaagaagcctggggctaatacagtaacgtatgacttgcataggatcggacagcaaatcagccaggtccaaccccgcagtcgtgcatagccacattaggtgttaatgacgagtttacttctagacaaaatcacatcttctagaaaagtaagggctgtttgaataagcacgtgtaacgcatttcctgtatcgtgaaggcaatacggaggttaagagcaacaaaataaatcttacctcagagagacacattactctgtgtcaatttaggtgcgtagtattgttgattccctataataatgatcatgacagcataatattccatggacaactatgtatgctcttgggatagctacattaatggggtaaaggtgcccgttcatacgtcatgcagccagatgtgtgggtccggggatagtttaggttgatctcaaccgacgcatatgtggaataacatttgaacgaacgggctttggaagtagatggaaagtttgagttggctatgtttttgagagcctcaaataatgttcacgtgtgtattataactgtaaatcgaacgctttgtcttcctactaagatgaggtcaggaaggttagaaactgtaaactgtggatagagccggggggctacggcaaccaagattccaagattccaagattccgatgtttacaatgcagccaaccttggcgatgtatgtgacctaaggaaactgtgagataccacggtgatgtcatcatatcattgcccctgccccggtgggactccagacagcataagtagccttctacttcccttggaattgacctattcttcatcacaactcatcctctactatctcaaataacttttcaaacaaccaaacgctcaacttcaaaatggagaccgccaaggttcgtgatcaaccaaaatctcttggtatttgctttatcattaactaaccaacaattatagaacgtcgttaactacgtctctgagaccatccagggaactggtgctgaggcttctaaggaggctaacaagagcgtcgccaaggacagcgatgccaagttcaccacccgcgccagtgctgccaaggatgcacttggcgacaagacggacgaggttgaacacaacaccaaggccgatgtccacaagggtaagctggaattatcgaacaaaactgctctaaaacggcactaacaacattccagaggctgccaagcactaaagtgtcaccttcacttgttatgtacaccatctagacggaattccggtcttttgatgatttgacgaagtaaatagttagcgaacaataccatctacaatttacgacattcacaatatctacagatagacttttagtaattaattatgaggcatatacttgacctcgcgtagaagttgtaaaaatgactgacatgtgcgttgacatgagcctgcctgcaaatcgaatttacaaaatataaacctttggcactctcccataacaaacagcaccactttgccacgtggtatatttggaaactagcgcagagcctatcggccatataccgaagatggtgggtgcttgttctagtgttattgggtggtcggcgctggctagactcatgattagaatgcatgaatcggaatcgggacttctggattatgaccggacttgtgataagaggctttatgcatataagcagccttgggcgtgcgttgtcagagctggatcatggtataaagctctgcgatctctgctcacccggtttacccggtttaccctgttcaccctgttcaccctgctcgactgctcttgccaggatgcatgaatcagaatgaggactactagcttcttactggtcttacgataagagacttcatgcatgtaagcagccttgagcgtgcgttgtccttgtttatggtctgaagctctcaccccgcttagctgctctgctcttgccaggatagcggggtccagccatccaacaagtaattgactcaaactatgaagcaagtaaattgattcgggcttatgaccatttgccagggtaaagatgttatctattaccagtgcttggttattctgaatatataaacggcaagaaaaccacccactccttcttagattcaatctctcaggactcttgcatccgaaattaaaccctaatagtaccgacatagtaagtttaggctgtcttactacactattctaggtaaagattttacacatagctaatgtgatacctctagggctattacctacctcccaacacgatgtgttataacatgataacatatagctgcggccacatcctcaagtcgcagtcgaccacctgcccatgtgacaagaaggatccggacatgacctcgagcttcaagtgcaaaacaacatgtaaggggtgaaattggtcaccatgcttggccgcgccggagcctcgtggcgctcgccaaagcacctttgagtactgaagggtggacaaattaccaaggtttctagcagggatatttgtttcaattgctggcagagtagctcttgcaacttgggaaggagagtggtaaaccacagctatttattatcttgacctcggaggctatcaaatattgtgcggttaaattgctatgactgaccattcctacctagtaatttatcttggaactaggactgaatcgaccttaaaatcgttcacttgcgatgtctcgtcaatagggctcgaggacgtactcaggcatcaataatggcctcaggcatcaaaccaaagacaaacttctcaaacaaccttggaacccctggagaatatctcaaacaagtccacaggcacaactgtacctgtacctacatgaccccacgtcctcagtgctaccttggatctgacaatcccgatgttctagactgcattaactgattggcgtaccacttgacacagactggtggactgccaatgagaccctggtagatgggtcggcaacgagttgaaacgtgttaggggtgccacaggaaaagctagtcgatgctgacgcaaaatctgatctccagtgccgtggaaacaacaaattatacggagtacatacctatgtatgaggacttcatgaagacaagtggctacgttgtggctcccttttccaacggtgatcagcattatatccatgacccaattctaattataactagtccagaccaaagtttaccaaagtccactaaagtccaccttttttttctctttcattcgtgcgcattatctttgtctcacatccgcttgtctttcccattcaatcgccccgttcccctcgtttaatctattttatttcgacttcatgctgggctcttgatctactccggcccctcgttcatgccggatagtcattcgttactgctttgacgtaatggatctacaacaattgggcttgcatgcccgcacggatgggacagataccttccttgagctcattgcaaatccatttcggtctgcagtaagtcgaaattgtttgcgaggaggaacaccacattgacaagctatagtttacagtcactgctatttgggcctcgctaggcacctcgatcggcgtcaccgtcctcctcgctctcctcttctccctagttcgaccccgtcactcgcttgtctatgcgcccaaagtcaagcatgcagacctcaaacacaccccgccgccggtgggcaagggcttcttcgcctgggtcaagccggtgatcaatacacgggaaccgcagctgatcgagtcagtcgggctggacgccgcaatcttcctccgctttacaaaaatgtgccgcaacatcttcatctttctcagtataatcggctgcctcgtcatgataccggtcaatattacacagagcaagaattctactgactcgacggcgtctgccgccttcaacatgatgacgcccctcaacatcaccaaccccatggccatttggagtcaagtggtatgcgcctgggcttttgatcttattgttgctttcttcttatggaggaactatcgcgctgtgcggaacctgcggaggacatatttccaaagcgctgaataccagcgcagtctgcatgccagaaccttgatgatcacggacatccctgtcaatagtcgtaccgatgaaggtattctgcggctaaccgacaaggtcaatcccacctcggccctcccacgagctgctattggccgcaatgtcagggatttgcctcgcctcatcaaggaacatgaagaggttgtccgagaactcgagtccgttttggccaagtatcttaagaacccggaccgattgccagcgaaacgaccgaccctacatccccctcgccgacaacgcaaacaattccccggcggcaaagtggacgcgatagattatctatccgtgcggattcgcgtcttggaagaggaaatcaagcatggccgggcgtcgattgatcgccgaaacgcgatgccgtacggctttgccagctgggacaatatcgagcacgcgcatgctgtggcatggaacgctcgccgcaaacgccctgagggcactactattgctcttgcgccgcggcccagcgatatcatatgggaaaaccttccgctttcaaaatccgcgcgcaagtggaagcgactgatcaattttatctgggtgacaggcttgacactggtgtggattgttcctaacggtttgattgccattttcttgtccaatctgtccaatctgggcttggtatggccggcgttccagacttcgctggcaatgaacccaaacgtttgggctgctgtccagggtattgcatcgcccgcactaacttcgctcgtgtatctggcgcttccggtgatcttccgtcgactttctatccaaggtggtagcaagactaaaacatctcgagagcgccacgtgctggggcatctgtatgcattcttcgttttcaacaatctgatcgtcttctcacttttctcggctgcttggtacttcgtgtcgttcgtggttgacaaaaccaaaaaccacgaagacgcttggcaagccatcttggaaagccggatgtatgccaaattggtaagcgctctctgcaccgtgtcaccgttctgggtgacgtatcttttgcagcgtaatctcggcgctgctattgatctggtgcagttcgttaccatggcttgggtctggttcgccaagacgttcctctcacccacaccccgacaggcaattgagtggaccgcaccgccatcattcgactacgccagttactacaactacttcctcttctatgccaccgtggctttctgtttcgctaccttgcaacccatcgtactgccggtgacagcattgtattttggtgtggatgccatgttgaagaagtatctattgatgtacgtgttcgtgactaagaatgagtctggtggtgcgttttggcgtgtgttattcaatcgcatgatcttcgctactattcttgcgaacgtgatcatcgctctcgtggccaaatcgagcggcacgtggaacatggtgttctgcgtgattcccctgcctttcttgatgattggattcaagatctattgcatgaagacgtttgactccgattgcgagtttgtaaaccgtgcaaatctaagcgatgccgaggccttaggtgtgaacacctcagacaagaaagcgtcagaccgtctgaataccaagttcggacaccctgccctgtacaaaccacttttgacacccatggtgcacgccaaggcagccgcagcactaaaagaaatctaccaaggtcgtctggaccagggtgacatgggcggcgagtactcagacattgcaatgaacccgatgctggcctcccagcccggcaagtctgccgaacccgcgcccttcgaggtcgtcccggagaaccatctagacttctcctactacaaggatcgagcagacttccgagacgagttcggaggcggcatctacggccggcctgatgacctgatgacagagcggtcacatacaccccgcagtaatttgcgaggcgagtggtctcccggctcatctcgtgcctcatcacccgcaccctctctgccatcaatgccgctgaacatgcacaagggttacgaacacgaacactccgacccgaccgggcttatccacccggccttccgtgtgccgctatcgcggggcaacagtggcaggtcggctgcaaacgcagacgagtcggagtccggactcctcagcaatgcacaggctcctgggcagacggatatcacgaatccgctcggtcgctggaggaccggtggttatggaccagtcgaccaggaagacgagccctcgtatacttcttacgacgcttaccgttcacatgggtaagctgttcggtcatattagccctgctgggcgaaacatttgcatctgtatagttttgtattctacaacatttctcggggggactcagcgtcatttctaaacacgaaggtcacgatttatttttttgctctgctcaaggcacatcttggaaatcaccatttacacgaagtggacaatttaaatatcatatttaatatcaaaatatcaaacttttacaaacccattcaacacatcttcagatcaatgccagccataaacacaggtcaagcctcacgtgagtattcagggtccagccaatcagatcagagtaccccaatcgtggaatccaagccgagcaagtgcaatttgactctctacagttcatttactgagaatcaaagcctgactctaaaaaatgaaccaaccgtgaaaaaagagctgtcagcagtgggtggtccgagtcgcagcgcgccaaagcaccgacacagctccaacccaccaacaaccgcaacctcccgaggctcacgagcgctctaatacacagcaaaataatggcgtggtactccatcctcccgccgggactcaccgaactcgagacctggttagctcgcatcttcgtgagtttccctctttcctctccgactttaccccccctcgtgacgcaccccttatgacgcagtcgctgacctaccccggattcgcagttcttcctcggtctcatcaccattggcccctgggccttcctcgtactcctagacgcaaccatctggatatatcgtatgaccctttgggaggtcccctggattggtggacgagcacgtggtcgccagcgccctcgcgcgccgagcttgaatgaacgcccggacgggcaacggagggcatttggactgcgcggcgtggagacggataccgggagcagcgagggagaaaatcaagatgattctccagggcgaaagggggagaaagatcgtgacgactctcagaaggagaatgtgagccctgttgttgtccaagcattaaatccacatttgagtggagatggtgtcttgaaacaaaggagctcggggcagatatgatgattggattgcgtctcctttggaatagtgatgatgtttatgaatcttgtgttattgttgtctcttgtcgctttgactatatgagcaagcatacatttcttttattgctcgtctcgtcttcccaggttgtgtgtgagaagacttatatacctatacatcgaagattgtatgatacttccagagtataacctacaatctattatacaaagccctagataatgagtagccaatcttacaataccccaactgtcttatcttgaaagtgccaaccccgcaggtcccgacatctcggccgtgtgagtcaatcagagaacaatggacggacagttcggccactcaaagtggggagagataagctccaacacgactctccaagccaagttcgctttctagtgaggagttcatgcggagtaggaggttgttcaaggataaaactctccgttgagcagggatctaaacttcgacagcttagatccactccatagtgatttgagcaggatggcacgcattctatacaaagccattgatacaccatggcctccattctccatatatctgttctttgctcttatcgtgggcacatgtgctgctgtgtggagggttcgacaatcccgtaaggctaatgcatacgggaggacgaagacaactttctcggacaataagacatcccccatcatacctcttgaaggattcaactgggaggagaccgagccgttacaattccggccgtttaaagggaaagacaaatacaacttgaccatgggtgagtccctcgtctgatgctatacaaatataccatactacaccactcgacacatatcgagactaatccatatcagcacttgaaagccttgatccgtccgagctcatcccaatggacaaaacatacaaggaccgactagctctccgcgagtccgtaatcgaccagcaccacgacatcgtggtgggaatcaacaacgaccaaaccccagaggaggatcctcgcatccgtcccgccattagcgaactatacaattatgttctgggaacatacctaccaacccgatatccgagcatgttccgtctaaccgttggaagctcgctcttccacaacctggtaacaggcgcaacgtggccgacaacgctgtcgccaacgacgccaacaatccaagccctagaaatcctgacccagacggtagacgaggatttcctgatcctgctccctgagttattccccgaaaatgaggaacagccgaaatccgtactacaggcatatgcgatctgtttcccggctggcttcaacatgagcgagaaactcgggcagcgtttagccgatattcatgtgccggtcccggggtatcaggaaaagattggacgcagcatggatcggttctttgcgcgcattgaggttgggaggtttgtgaaacgggctaattggagtattactattgacacgggcctgtttgctgcttttggtgggacacatgctgagccggggaaaaaagaggaggctattgagcccgggaaattgaatgttgatcaggtatgttggcttcgaggaagtccatttgatcggatagtgctgatatcactaaagacttgtctccgatgtgagcgtcagacgttgcatcggctgccggtgtccaaggctctcgtctttaccgtccacacttatctttatccaattaagcagattaaggatgagggttctggtgaggaccttgcgaacgcggtcgatggcttgaagaggggtaatgtgccaggaatgcatatttataagaagggagatgtgtggggagaagcattgaaagacttcctaaggacttagacacttcagtatgttggagttctgcgcaagatacatgaattatatggtatatatgacaccaggcttggactcagaaagggcgtttctttatttatatgcattgtcaaatttttggtttgattcttttaggcctccaatgctcgcaatttagcggaggcgctcgacaaccttgataagatcggccgaaacacccatagcggtaacttcaccaccggcaccggcaccctgcacaatcaggggattggcaccgtagcgcttagtgtaaaagctgatgatgttgtcactgcccttcagaccagcgatggcgctgtccttatcaaagtactgcagaccaaccttgacagccttggcggcgacatcaatgcttccaacgtagcgcacaaccttgccctgcttctcggcagtatccttgatgttggccatttgggcatcgaactcagggagacgagtcatgaactgagtaatgccgtccgcggatgaaggcagagatgcgagctcagcggggatcagcgactcaatagggaaagagtcagggcgggaaacctccagaccagcaatacgggccaggatggtcagcttgcgtgcaacgtccatgccgttcaggtcatcacgaggatccggctcggtgtagcccagctccttagcctgggcgacgacagcactccactgggcatcagaagcacctgatgcaggggcaaaggtgttgaagaggaaggagagagtgccagagaagacaccctcaatgcgggtgacctcatcgccggtagcaaccaggtccttcaaggtcgacaacacgggcaggccggcgcccacggtgctctcgtggtatacgagagccttaccctcagccgcagaggcaaagatatccttccacaaggacagatcatcggagaatcccttcttgttgggtgtcaccactgagatgcccttcttgaggaatgtggggtattgccgggcgaggctaatgtcagaagtgttatcgaccaaaatggctcggccaggtgcggaggcgaggtatgtagcgatttcttcggcctggagggcaccgctcttggtcagcgatggtgcggcagcagcagtggcccaatcggcggcggggatggctggcgaataggcgggactcggggaaaggagggtctgggaggaacgggcaaggaggacaagctggggtgcattggggagacgagcgagctgttggaggaaggccgtaccaacgcctccgacacctaattgataaaatcgttagtactcaattggttggacttttaaagctcagtagtgagggacacctaccaatgacaccaaggtagataggactagccgacatattgctgattgatgattttttttcttgattatttcgatcagcttaactttctgattctcagtcaagagtccaatatcagatcaaaactaagagaacaatcaattgactcacggcgcaatcgattcacctgagtagtgggggtgcggggctgccccgaatatcggcattagtcattaagagcggcagaaaatgacataagggttggcggtgtatattggcttatcgataagccggtggctgtaggaaatacggtaaactccgcgcgtgaaacctgtaacttcttgtcactacacgtgtatcattcacattatcatgcctgctgatcaggattccctctacgggcagccgcgccaaaaaaagaccaaaaccgaacaagtcacctcctcaagcctcgccttcacctctcagctctcttcactcatcgcccaagatgcgacctcagcttcgtcgcggggacgccaccgtccctccaagaatccgaagtctgatatcttttcaaagcacaacaaaggtactcagaagcgtgcagctgccgatcttgcagatgacaacagggctctcaagcaagttcacaggagcacccaggacattggctctgttgacgccatcacactgggccggtctcgacgtcgaatgcaggaaaaggcgcgcctctacgaagatatgaagaagggattacatcttgccggtgatagtgatgatgatgatgacatgtcggctgatccatccgatccggacgcctacctagcccgactaagacgcaaggagaaggacgtattggttgattttgatctcaagcacgcaagcgaggagcaactcaagcaagatgagtccgatgacgacaatgcatccattgtttcctacgaagacgaatttggccggtctcgccgtgacactcgcgccgaagccgccgaagcttctcgcgccatggatgaagaagcgggtgccaaagctgcccaagaacgctggcgccctgctcgtcctgacaatttgatttacggagaggccgttcagaccgaagccttcaatcctgatgccaacattgcgtcgcacatgtcccatctcgccgctcgtcgtgaccgctcgcctaccccgccggagaagaagcattacgaggctgaagcggagattcgcaaccgtggaactggattctatagcttttccaccgatgagggggagcgcaagcagcagatggaagaactccgagttctgcgagaggaaactttatccaagcggaaaacggacgaggaacggatggctgagcgcaaggcccatttacagtggcgatgcgaagagattcaaagactttctaaggaaaatatggagacgtggcgcctagaggaccttgaagccgaacgcaaccccgagccaaaggtagcccctccacctaaaccacccccctcaaaatggctgtaccctgagtccgaccccccgtatgactggactacatgcccactggcacgacggtacatgttcatggatcatcctgaaccagacgatatcgctggctttacaggggataacaacgctgcaaaggatatggacacttcgtaagtttctttcatgatgttccgcatgtggccaagtgattcctcatcacctttccatcgcatctgctcgcgcttcaatgtgctttctggtttctactttgcgtttcttttgtatatgtgatacccctagtaagttggcttaaatttatttctaaacaatggttttggttgaacctagtctacgtttaggcctagcagaaatatgggagcgaagaagccatggagctgtagaggttccacggcgaggacaatccattatagacatacatatgtccaaagaggtaccaaactagcaatccggactactagaaagaaatccacggctcttgaaatcttgaatcatcgcaatcatatcaacataactcataaatcatcatgtcagaacagagattccaattaaaaaccatcagtccaactgttcctatcataactcaatcgcccagttcatccatgacatccacgaacatccgagcatctaaacaaacgtccaatcagtcaacaatacccgagactgttgcgtccaaccacttaccagaagagcgcgtgaactccaggatatgataaccttgtgaggtctgcggggggtcgtaatcatcgacagacataaatatgatgggcttgatatcacgcacaatcaccgttttggaaccctgcaacttaagccaactgcgttttccaaggttgtgggtgacgaatgctgtccagacgggtgtgctgtgttcattttcattagaattcattttcgatgtttaattcgtacaattgacgcttgacatactgattcatctcgcctaggtggactgacgcctgcattcttacggctccagtcaccgtgtctttgtatacgcgcagcgcatgcatgtacccatcgtcggtgatcgggctagaagatatcagcctgtctgaactcaattatccttggtatggtgtggattgctcacgctccaaagcgttgctgttcgtgtgtcagctcgtggtctaggatttctcctataggatggcctgcatcctgggagcgcaaggcgaggaatacgttatggaatatcactagatctgaaagataaagctgtaagtatgtcacttcaacagcccaaggcggggttttcagattagcattgctgaccttccaatgtgctgaacttcaacagggtccataaaacaagctctgttccatgattccgccgcctgcacagtcggaggcaagagccatctcgcatgagctcgagtaaattcagcggcaagcagtagtagtcgctaggccccgtccggtggggcttcttgcaaaggatgcggacacgatggtctgttttccttagataaaaggccacacgcatatcggactcgtcgtttaggcatctatactgtgttaaaatgtatgctcaaaggagtaaaatttcgcaacttgcaggtggatgagttcctcatagcccttgtctttaattgattgtttaatgccaggttgagattctccgcagcagcgtgacctattgccaaaatatgttagccaaattctgagaactaaaccaagctatctataactcacttttctctcgaagacggtagaggagtgttggtagtattacacccgaatgtatccttggcccagtgttcttgaataacatccgcgctagtactagcggatgtcgaagtgaacggcgagagcgggatatccgggacagacggcgggaaatccgaagaagtgccggaggaaggcgacattggcggaggagacatatgcgacggccgagcgcgctcgaatgacctccggcgccgtctgttcaggtcaataaccgggcggccactcgtcggacgttccctcaccgggcgctcccttgggaggcgctcccttaccgggctcgggggagtcgctgggcggtggccgataggcgagtcatccgggcggagtgtcatgccttcaaagcgagcagcgaacagaccatcttgtatggagagtaaggccttgaattgattgacgagcatcacgagggttgacgaggtatagtgaccactaacaacgaccaggaataagtacacgcatgcgcttgtctactagttttgcctggcggagcacctactctcttaccaagtcatagaactctttaaaggccgtcttatacttggctaggcgggctgccagggagtagtttgattgatcccaaaagaaccgactcataaatgcccatgtgcgcttgtacatcgctggactagcatctgggccatcaagacgtctgaaaatatcgccgatatcctcaatcgtatatgtgaaactggcttgcaccacggtcaaatcgggtttgatcatttcaaaatagcggcgatttcggggatcttctgctagatgttgcaaagcggacaaggatgagctgatggcgaataactcggacaagagcgccgagatctcgctcatgtgttctgggagagggtctcggaatgtataaaaaccagccgccacgtcgtcggcgctctcacgagacgcgcgcagagcctgagccatattatagtacagggttaggccatatacgggttggtgattttcttgggggaggcgcggagggatctggtggggagggctctctcgaagggggagggggctagggaaaaaattaggaactaaacaataggccaataggctcacatgcgcacaattaacattatttagaaaagacgaaacgaaaaacggaaagaaagccctcgagataagaagcgggaaaagaaaaaatctttgcccatgaggctctcgagacagggttgtcccaggaccgacgtgttcacgcccgaatggcggggcttgtggagtcttggtctcatcgtcatctctttcgcttttctcatagaccgcttgttcacggatgtatggaggatgtagagaatatagagaatggctctgtatactcttataagctcggtataagcttcagttcatagggtcgtcccggccctaaatgcggagaagtggtcaattttatgcttatggctctcagttagaccaatcataggagcgctttggggtaatactccatatggagagggaataaactgtctaacatgagatatgcccgatataactagccccactaggtaaaatacgtggcatacatatgttccagataaactctttcccggtttgcttgcatatgatatcaaagtcagtgaaattaagtaacagaaagccaatcctaccaagttaattggtttccttgaaatctctagataaatgcgcttcttgccggacttctataccccacaaccagaagtctatatataggtaatgtcgagcaagtaccaccgaattacgggtccctgagcgggcttttgcgaggtccgatggtgtcgttaatccccacttcatatccccagtgatttatgccatagcgagttacacattccctggttggaagaaacccgcgaaataccagacaccgctcttcacatacagacgatgctagactctatgaggccgactttaggacactatagacccaacaaatgtcccgctctactagcggatgttatcgttgaattcggcatatgaagaggtatagcttgaggtagcgcgattatcctggacagtcagcccttcgtaaggtgacggagcgctgctggcgaatgcgaggtcttcggcttctttgcctatagacaacattaaaatgaacgcaccgtgtgatcattgcgagtgaataaaagagaaggcacacgagaaacgggcctagtcgatgtttgctgatcgatcaagagtcctagatgggatggttccttccctgctcgaagcagctggggcgaaacatgatagaccagcctaattcagcaggcgagaggccgcgacaactgatgtctaaaaaatggtatctgacagaagtgggagtcagatgcaatcgcgagaaacagttgattttgcgtgtctctaaacgacgaaatattgcagtcaactctcgaaactggtcatggaaggtactctgttacccccaaagaataaaaggaaatatatacccactgaattaatctcaattccaccaaattatacggaaagcgttgatttcgaagttctgggaaagctgtatgaattttacgatcgtttaaaccgatcagccatctggttcacgtaatgatacggtgatgggtagtgaagaaagcttgagcatcaaaacggaagggagaaagccatcgatcgggatcgagagcttaggatcggaggtctcacgaacccaagctgcagatagtgtacatcgtagttttagataccgccttgtgatcgatccaggtggcatttgttcgacttctgcaacatagatttagactctccaatgaaatttccggtcagtaaatgcagaaacattggttggaactcttccagcatctgaaacaaatccaaagttaagcttcgagcttcgagcttcgaccccggattcttagggcggtgaatgacgcaggcggtgagacacgcccgattttgcggggcaaaaaagctcaagagctctggagagctcccgaagcttccccgaagctcgacagccgaagatcagacctaaagtgaggcgaatctgaacgcggcacacaagacccctcgcacaacagactaaatcctgattttgaatcatccccataagctagtgatattgccaagacttgcttgctatttttacaaccattgaaagcttaatggaactggccttgacactaattaaaaaaaggttgagatttcccattgataacttaataccctcgataagagcaaagaggaacagttcagaagcaagtaaaccccagccgtcctccaaacccagaaaccgtgcacgaaaccgtccgaaaaaaacatcaggagaaccattagagaaacacaaacgcccagaggcaaaagacgaagtgaagctagagggcgtttaagaggattcctcctcttcctcctcctcagccttggcgaggtaggcggccttctcctcttcgtagcgcttcttgtcggcggcggccttagcatcgtagggcttgcggtcggtctcgctcagagccttccacttgtcaccgagctgcttgccaacctggcctgtgggggtgttagataagtacaatggagttggggaatcaattcactgaccgaagctgatgccggggttctcctcgcggaccttatcacggttgtcattggcgaagaacatgtaagcggacagaccacgcttgggcgcgttggggtctaagtcaattagtacaagccgttgacgacgaggttacttccatgtcgaacttacccttcttgcggcgctggacgcgcttctcgggggccttgcgggtggtcttggtggtggtctccttaggcatgatgactgtcgaaggttagatgtggtttccgaggattcttggcacaatagataatatgcgggagaaacgaaaggcgcgattgagtcaagtgaaggtttatatgcgcaattgacatgacatttaatgagatcggagtggaggtgggagatgagaagggcagacgcgagtgttggctagacgcgttgcgcgcaaccaaccacttgcgaccgaggcaaaacagagctttgagatgatagggatgagaccaactcacatgaatttgatgatcacaaattaggaatatgttttgaaaagaaaaaggactgtgcgattgcgagttagttgaggtggacaaaaacatagatcgaggtgcagcgcgcgatcgcaaggtcggcgcaaattgggaaaaaaaaagacaggcaatgaggtgaaaataaaggattgcaaggaccaaaagaactgaaaaaaaaagggggtggtggttgtggtggaggaaattcgattgcgaagtgttgatttatagaactcggggtatatgcagtacctttttttgtaaggggagtttttgtatggggagttggtagtgtaggaagatagtaagagaagagaagagtagaggggggagggccgtagtagtagcaaagagaggggggccacagcaagggaaaggcactggtttcgctgactggctgggagaaaacgtatgatcaatacccgtaacttacgccgtccaccatactattcgtcactgatttctggaaatttacgtattatttcccccaggttaccgtcagaatttccatttagatcgtttgctatgatatattcatgtacattccttttttttttttttttttagcaagactttgtgggcggctgtaccgattagaaaattcaatacggcgtccacgggttatgaaacgagaccatcattccggcacttgggacttgtggattgcgctccgtcatattaataaccgcgcaaacgtacaggtacacggtacgcggtaactccatagtggaagtatctgctcggcaagtacctcgtacttgtcattaccgtggagtgtttgccattgatttgatatacatacttcgtacaatatggcttatattgtaacgttatgctaataataaggccgcaatgatgcctacagttgtggcaagtaggctacgatgtatgtcataaagagtccggagaacccctggacgaaggtacaaatagaatcgagcatttccatgtatttaggtcgggcagggtttgttgtgtacaggcatggaatatcatggacttgcttccatagggtatagcgtatagtggctttggtcgcgagtcgcaaggtcatgtgcaggtacatattattattgtacggggtactttgcggttctagaaagacagatcctagtttactacggggtattgtatcattattcccctggtcgatagaataagaattccgaaaacacggtctacttaagctctcggtgtcaatatcattcggttgagaactctgtgtaatgacacaaaccctaatcatcacgcacgcaacgcgtgtctagacgtgtgtacacaacagtgtgagtactcgtaccaagtactcaactatcatcctcaggcaagggcgactgactggtcgctcaatcataatcgttgcgcttccttttagcgtaacctcaattggaaactcggctgggcaggtacttaggaaggggcctgttagacctgttgataaagggcatacgtgttctagaccctaactagcatggatgaatgtggcataatgtggcatagagttatcgctattttcttagtccgagcattatccacgcctagactgataggttacaaagtgagacggtatggcatgggacggcttaaaggttagactccttccttacagagccggatcacaccatcatcacaagctaaatccagcctggatatcttttccaatatgagtagactgcatggatattccatctatggggtaatgtgctccaatccgtcaaatgcctcagattgctcctttaacttgcagataccagactagtacaatattgtagagttggcagacagattaaaagcaaaagtccgtactcgtactgtagacattgtcaagtccaaacgcatagaccacgcatggacattctggtgttccctgaaagaaacccttctttcttacacataccgttgatactgcagtactgtggatgtgtaaggagggctaatccacctgtactccgtaatgtacggagtactctgtacagttccacgccttccgacaggaaagtgtattgtggactccaaattgatatctcatcgctagctaattaaaaagtgatagttatgcaattatccgagcgtagagcccttacttctcagacgcgaccagagtacaccgctgtgtatagccgtcataattgcagtactgatggaacacattgcccaggtgtaataattattatccagtccacattagttattcggctaaaattaccattctctttttttcttcttctagaaacagaaatcaaatgtcccggagacttgggtaatatcgtatagcgcctgtgctccttaagtacatgtacagttgatggtcggaattaagaaatgtagaaaacgggcaagccgcgtcgcaaaaaagaacaaacatcagtcatcactttcatccagcaccaacgcgcgcaacatgtcgtcatcagcccaatttagtccactggcaacaactacagcacttgcgatggacttcatagtttcccactgagctttgcgcgccttgaaatcagtttcagacttgtccaggcgcgataacagctcggggtcttcaagcttctctctccatgatgaatcttctttcgtgagctctagtagctggcgcactagttcctggttttcgcgattgatctggagattctttacttgtaggtttgagagctgcctcatcaccaagtcatgtgccgacgcgaggttctcgtgtgcaagggcaagcacatcgcgacgattcaccagacaaagaatggctctgcgtatctttgttagacttcggtctagtttaagggctcttcatgggtacatacctctcagcaggggttgcagccttcaggtggacagctttgagaataggctcagtcatgaggatggtgcgaacggccttcctcctgactgtataagtagatcgggcctctagaagctcacgttccgcgattgcgagctgttcttcagcatccgcgcccgaatatgattccagttctaatagaacaaaagtgattagaaaggaaaaaaaaaaaattaaggaaaagaaaacaagcatataccttgttcgagaaatgccttttctagctgctgttcctggatctggttgtagagctgcagcaccaaggcctctttatccgatagagtcacgacatcgcgatagtcatctgcagcataatctaatagtgtcacctcaccagattgtaggtgaggcagcgactggccatgttttgcagccatcgatgtagatcccatgaatgcgggcctatctggtgatatgaagatgagaccggaggcggtgggcgagcttccccggccacaggttgcggagcaaccttcaacgtactgaccagcctgaccggggcttcaggactttcattcttttctttctttccttacaggcaggtgtctcctttttgggaaatacttctcacttttctctctactgagcatctaagctcgcctggtgcggaggaaggtaatgtcgttgcacatctacattgctcacaccggggagcatttcctggccgatccagtggcatttgcttcgtatgtctccactatcttcattgctatttatctatgttgatcagatctatctgaactccagctgacgcttgtgcatttctattagtcccgatgctttgaagtcatggatcgttcgaaatacatctattccgccaccacggcagatcttgatgaccgcccggggaaagaatgtcaaaatccaaacgcttgctaccgaggtactatattacgaatatcaatcataacctggaaatcggctaactcataggcaactatcgcagaatgagatctttgtatatgaccgacaatacgtcagtgaaccaggtgacgtcgagtttccggaacgacctcctcctgaaccattccgacccggtagtcccccggctacactgaaagactcgaacgaccttcaggcatggcggaacctatatatggcacggcgcaactgggcgctggacttgtccagccgctgtgggtcgattgataagaacctccgagaacataacgagcgaaccgatgttataaatcgcgcggtgggcgtggccctggagaatctcaagtcgcatgtgggtaacttagagcatcggttccaagaggcgcagacatgggcgaatagccttttagaagagcagcaggccgctttagatggttggcaacgagctctctccacactggataacataccggcacgtaaggatttccctcttcttggacgcccgtccacgcctaaaatggacgaggatcgaccaaccggaacgctgcgcgactttgtcgatgtaggcgaggtccaacgggctggatcagaggcagcaactgtgtcggcggactttgttgctagcgtccatgaaattgaaaaggcaatcggcgacatcgcctcggacactcaacaattagtagaagatgcccttgcctcaaatttcgacggggtggatgggtggctggaagaagtggagactattgcgaagaagatcgagtctgattatgagcatgtcctcggcctgccgaacaaccagaaaacgttggccaatatatcaagacttgcactcagccatacgcaagaccttcttccatcgctagtggagatcagcgtcgagcttcaagctgcgctagagcacgctgtgcaacgccgaggggccgcggagaaagcggccattcagcatatgcgcacgatttcctctcttgagtccagacttgccgacgccaatgcacgaatggtcaatctggacatagggagtaatgcctttggggttatatactctgtcttccaaatgccaatggtatatgggtcgatccttatcgaatccgtgcggcggcgagaatggagtgagaagattaagactgactccttgacgctggccgaggagatggccattttgagggacgaagagcaacgtcgcagaaaaaagtggttaaagaatatgggggactatatgactgtgactgattccaccacaccgggaatcgaagtcaaccttcaaggtcaggatgaggaatggcccgaagtagcccggaaagagatcgagtattacatcgacgatttaaaaaccactcattccttgaccaacttagcggaagagctcacccagcagctcaaggcgctagatgcaccaactcggcaacaaagacgtcgggccaaagcgttcaaacaaggcagcgtatttgacttgagccggagctctatattacgcgccgatgactccgtccgtagcttacaagaagaaaagacaaagctagaagaaaggatcaaggggtctgacagtcgcgtccgcaaattggaagaccttttgcaccgacagagtcagctcagccggccatcgagcggcactttcggccccgacttccccggttcacctgcatctcctcaccctgatacattctctagacggtcatcaatgtcttcgaggagagtctctgcgactcagtctcccgaagagaaagcacttgtccagcgcattgttacgcttgaagcagagttggcggccgagagagatgcggtccagcgactccataaggaagcccacgccgagcggcaaaccaactccgacaagttccaagaagcccaatccaccaaaaaggatctcataggcaaccttgaagcgcgccagcgtgaatttgaagacgagcgccgatatctggactcagagctaaagaagttcagactccgtactgaggaaatggaagaagagcttgatcgacttatggacagcagagagcatggaaaacaagaacttgacgaccggatgcaccagctcgaagtcgaccttgaacatgctcacgccaattccgccgaggacgcacagaaaatcattgatcttaacgcacagattcaaactcggcaagagcgagaagaaggcctccaggctaagattgataaactcgagcaccaacaaatggagttcgagcaaaagcagcaggaaagttaccaagccctccaagttatcttcatgaacctctcacctgggggtattgtgcctgtcgaaattcccgacctaatcaaagccattgaagttctctccgagggtctgtcgatccacgccaagagtgcggaatcgagtgcatctcaggcaatggccgagagtaaggcccttgaagaacagattgccaaactcgaatcggaggcagaagagcggacgaagagcttcgatgaacgtgaggccgaattgtcgcgactaactacagagctgtcacgcgcgcagtcaaagtcgaatgacttgactagtgaactggacaaagagcgatccaagtacaattccttgcactctcaaattactggagagagtggctccgatgcgctgcgtgaacagatcgccgaagagcaacagaaacaggcagagatgtcgcggaaactggctgaagctgagagtgaagcccgaaatttgaaagatcaggctgcggaatgggagaaaaaatcagggagtccttcggagactgagaaacgggctgtcgcgcggtccgaagctcgaggtactaagtccttcgagctttctagtcagctcttcgcccaggttgagaagctgggtcggatgctcgaacaattggggttcaccatcattcagcaagatggtcagctccttgttcaacgagcttcaaagcttagtgcatcattggccctaggcgaaagcctcgcacagtccggtattgtatccctgaagccggataccgcgctcctagactggatgaaagccgaaagcctggaggatgaagagaaaaaattctcggctttcatggaaagcctagctcagttcgacgtggccctatttggtgatgttgttgtcaaacgcgtcaaggacatcgaactcctagctcgcaaatggcaaaaggaagctcgaggctatcgtgaaaaataccaccgagttcagagcgaggcccatgacaagatcgcctacagatcatttaaagaaggcgatcttgctctcttccttcccacacggaatcaagccattcgctcctgggcagccttcaacgttggcgcgccgcactatttccttcgcgaacaagattcacacaaactacaagctcgagactggcttctcgcccgcatcaccaagatcgaggaacgagttgtagatctgtccaaatcaatgaacggtatcgccccagaccgtcgctccctcggggccgccagcgacgtcacctctctggccgacgagaatccgttcgagctttcagatggcctccgttggtatctcctcgatgctgtagaagagaagcccggtgcgcctgccacaccggggctagcgaagagcacagttgcatcagcgcacgtcgatgccaagggtagcatccgcctcaagcgtgctacggacgagggcgctattgccaaaaccctatctaggagccttgatagccgccgcgagagttcaaattccaagcggggcacgcccgcgccgtcgcagcacgctgcggactccacgaccgatcttgtccgccttgccgaaggtgatgccggcacacagcctcgagaggctgctccgaccttcgacgaggttcgccgtaacctgccctccggcccgtgaaaagtaggacttatttatcttccgacttttccgggtctgttttttatataatttgataccggtactaatcgttttcctttggcttaggatcctgtctctgcatcggctcagccaaacataagtagcaccgcttctttaccctctcggccggcgtctgatcgtcgacacaacggccgatctcgtccgtgggagaaattgtggtctcttgactatcgactcgagggtggcgcaccatagactggttttttatttttatttatttataagctctggcgtactaagacgtggcattgttctttggtttcttttcggttcttcctggacatatacgtgtcccatttgcttttgacattgatttagtccagatacccagcaatgcaatctatacttgaatatattaatctacttgaagtggtatagggcacaagttgccggttgagctttatgaaacgtacgtcaaaatatactcaaacacaaagataatttacatagcaggtaagccgaggttgatgaatgaaaaaaaaaaaaaaaaagaaaagaaaattgaatagttaactagtctcaactggaacccgggtctaatccttccacgccttccatgccacccatgtcatgccaaaattggctgaaatccacgttctcgtcttcaaacatctgcttcgcttgcatcatcgcagaccgttgccgttccacagtgaaaccaccaggccgcgagctctcccattgaattagctcgacccaacgcaggaagagatcctccttgcccatatcggccaacttgtccttgaaggcaaggagttggtcgcgctgaacggagtctttttggctggtgggggtattatcatccccaacacgccagatcaaccaaccgtcagcatcagtgttaaccagcacggcagtgcggaattcatccatcttcacaccatcggttctgcgagtgcgctcaacaagaccatgagcacgaaccatagccgcatagtctaaattccaatcctcgtccacgagcaagtaaccagtcttggcgattcgctcgggagtcaccgcggcgacgatcttatcgcgacgcgcctcgtcgtcgcggatccaccggttgcgctctagctccttgctccaactgcggttactgcggcggacgatgatttctcgctcaaggaaaccgatggcacgacgccagtgcaacggccctctgacgaaattaacaggccacgaccacagcagggacacgaggaagtagtcgacgcatatatttccagtccgccacaggatgattcgtaccgcttctggccacggggtagacgtgtccacagtcatggaatttttgagcccgatcaatgttcccacgagcgctggatacgtactaattcccatgtacacccgtaggccaagtatagcagttactatcaggttgacgataaggggtacggtgaaggtctgtcgtttcagttcctctgctgtggtgtcgatgtgcactaggtatacttcgtccggggagagttgctcgacgaacggttgcaaggcttgcggaactttggtgaatggtgggatcgggcctgaggaggcggagcttggtgtcgaggctccggatgaagatggcgtcttgccgcgacctgaacgccgtgatgattttgccatggcggggttgatagatggatattccactgaattgctggatatgatctgagtttgagtttttctcaaaggcttaattaaaatgtgagtttgctgctttcgtcgaagctcttaaggatgtggcgactaaacgtgtcacatgtcaagataaagtgagggacatttgagcacgacgaggttacaaataatctcctgataaggtcctcagcgtaaatataagtaaagacaagttgaaatggcaagttgtcagtgcttgaagagtcgacgtaatgcggaagaaatccagacggcctaaccacattcgggaatgggagcgtatttacctccgtcatttcttcacggcgcaggagaaccgcgtctttctccttttcccctacctttctacatgtaaatcctctgcaggctgcaaggggtatttcagccatggctctcgatagaaacaatcgagtctcgcaagatagacaaccctcacctttccgacgcgcctcgaaattcgaccatcacgatatacctgcgaaactcccattaccccctcaagatggtccgcatccacgacacgctattcgcccacgatctctagtcgatgcgtatcgagacgcatcaaaacacgcaatgtccgccacatacgaagaatataactatgtgaccacaccaagcccgcgatcgaagcgacaggcgattaacgcgttatcgccaatatctcagacctctcctcccccccaagaactagaagatgcatataggcgaattgatgaagatgacgccctagccgatctcgtgcgcgactatgactgggagccacaattcagcgcacgccccggaagccgaaatcgccccccgtccccccgagcaaagtacacaaacggcggtcgagcatctgccaatggacgatccatctccgacgctagttttggtgatgacctcggcgatcatcgagcgcgcaagagtagggactataccaaggatgaagagcgcctaaagcgggtcacgggccaacgctcgccggttttcagcagggcgcaggtaggacgggatgccctgacggcagataatctgaggagacgaatggaggataagactgaggtggatcagcagatgctagaggctgacatgaacggtgttccttcgccgaatgtacccagtggttggggtcatcgcgcaggttatcgacaagaatgggagagaaagcctacccagcctagtatctccgaagaggagaaggaaaaagcgcgtcgacgctggtcgccaatgacggaagaaatccaagcccccaggtctacgcatacctcccctcgttctccggcgcgggcactttctgctagaagcgcgcttgaggaacgcactgccaatccgcatatgcaggcaatgcgggaggactacggggaagcgcagtctggcccaaagccgacttcgcctactagcggtggcgagccaattccaaattcccctatcacagtattcaaaaacgcgtcattcgcaaggcccagcctcagcaagcgcgactcccgggatttactacgcaaactctcaaggactgaaacccccaaaattgaacatgtccagactcccgagccactcaaactgtttcaaagcaaagtctatgacaaaacccctcgagtaactggcgcgtggatcgatactcctatgacccagcgggtggctgagaaggtcgagcttcccgaagatctgacgaaagatatcattcctccacgcataacggatgatcctaaggatactgcacctacgaaactcatggaggtcgaatcgaaacccggtgaaccgaagcccgcgcagactagcgaaaaagagcctctttctgaaccactttctggaaagcagtcgaggcccgcgttgccgcgaccccatctacctaaaagtgcattggagacagtcattgaggatgctagctctggcaaagatgtcgaattcggagaagataccatcgagtctcttcaagcatttatggacgggccaggtgaacctaaaatagaggaagacgacgaagcttacgaaaaggccgtcctcgcccagctcgaaaacggcagttcaaaagaaaataatgcaggcaatttggattcattgaatgccaagctcaactctttaatgagacatatcgatgaggtcaagaaagggcttgacggcctggaaaattacgttacacaagacaccgccattgtgtcggaggcaagctccttaaacaagaagagcctccagtcattacacctgcacacaagcgattccggcacaggccgtggtaccactccctctgatggacgggtctacgccgcgatacctctccctcggctgtggacggggagcccacgatcccaacgccttcggccaaccaagctcggctggttcatcattatttcgctctcgtggtatatcatcgaatgtctgatgtgggaccggtatagtcatcccgagatatcagaaagctgcgaaggttactgcctgcagcccgatgcgccttggtatccctgggtaactgtcacgatgttgtggcgctggtcacatctatcgactattttcacgcctatttttgctctctgtgttgctttctctcgactcgtggcgcaattgatgggtctctcggatggctacgtcgacgacgcgccggaacttggaaatatcgttggcgaaatccgcatcaacggaacaccagtcgcgttcccttggctatcagcccccacgcctgagaacattgtgcctcaaccacagcaggtctactatacacagcagcctgtgcaaacgcagcctgtctggtcggttcgggacccgcccccgcagaggtgggacaatgaccagctgttgggggaggatataatggacgatgatgaatatctttagttctcaaggtttcttctaaattccccagagatttgctttgcgcgtttcgctccgaatcatcattttgctcatatgagctggactcgtgtgttatcatgattctaattcgtagtttgagatgctatctaatgtagcgattcattgctataatctctagttaacaaagtaataagtgatatagtcttctggatagccataaacgcccaacacgtgtaagatcgcgcgactggctctccagggctatcgcccatctatcacagaaatggttcgtcacgaggatcattaaaaatacaaatagggtattataaagcaaaaggaaagaagcaaaccatacaaaaccacttacaaccgcgctgtcgcgcgccattgcttctgcaattcgatctctccctccattttccaagcagtcattcgctgcatgagggcctcaacctgctcatcactgacttcacaggccttttcaatcggtatttcctttgtcaactgcagcttgaagcccaaccaggtgaggttcccggttgacacaatccggccagcaacagcatcacggcagaacccagcaaagctctcgaagaaacgatggctagctggcctatccatcatgagtataccgtggcagtgcggcataccctcgaacaattccgcgacgagaggcgcaccggcttggtggacacggcgcgctagaatgagatcttcgtctgtgagaccttcctcgccagtcgagatccagataggcggtgcgttcttccatagatcagccggggtagcgagcggagatactaatgggtggctcagcatgctggcgttgcagtagatgtcagcgcgaggtggggacgtgggccaaacatcgtctggtatgacatggaccggagtagtaaatagagtcttgacagctgggtcgttagggggcgcagccggcgcttcgagataatcgaggtatgcattgccgctggtagatggcatggagcgagacacatcgcaccagggagagatggttgcgacgcctgcgggcagttctataggcacatctttgccgtggaagcggatagtgtgagatgcgcggtcgagggtcaagagtgtttggaggaggaccagtgagaggttcccgccggcggaatccccagcgaatacgatcttgttggctggcacgggtttgtgaagggagcctggaggggggtggaggagtgagaggtatgccgttaaggcgtcgacaagcgcggctgggaatggattttgaggagcaaggcgatatcggacggataagacgggggcgccggtcaagtgggacaggcgtgcgacggggacgcggtggctgcagggatccataaggctttttttttggatgcgttagctatgcgcacggttgtaagagggtcgagcgacactcaccaatacgctcctccgtggaaatacaagatcatcatatcagacggcgattcctggcgcagcttgtggtatttctcctcttctgagagatcgggctccggtgttttctttccaaccccggcgcgataaccggtccattcagcttcgacggcgatagttgcggggatatcgtatgtctcattgccggtcttgaggtcttcaattgcgcgtattaccgcatcgcgcacgtcgacctcgggctgtgggagggtcactttggacacccacatggggcccttcactccagggtcgcgtatgccttgtctctgggttttaccaagtggagcttttgttgacatgaatgagcgaataatggcgacggttaattcggtgcgcatgtcctgtttccccttgacgggggacatttgaatgccatggaggaggacggtcttgaggattagcgggatgcgcaccagcagcaccttcaagagagcgagagtttccctcagcgagctcatagtgcgaaggtggcaactttgaggactggcttttgcgaaataacgaaaagggaggtgggagagaaagacctcaagatcttaaccttggaagatgctaaactggttttagttcctgagtggcgtcagtgccgaggtccgtggatcattggtacccacaagccctaattctgaattgcttcaatgtgtactccgtatgtagtattgatattcttttcgttgatttatgatatgattgatcattatatatatcatgacggctttgctttagtgtacttcatctgacttaccagtaggttgccaagctaccagattatgccggttatgacctgcatcacatgtacctaggtagcattactctgaacatatgatattgcagcattaagctgtggaaaaaaaacgcttataacaaccacaagacttgacatcgcgtggtaaatgggcatacaatgccgtcgtcgtcccttattagagtaccaccccaaccaagtatgtagttctgtggcttcatatccgatgacaacagccgggatatttctaacacgatatcagaacgtgaacgccctcatattcctaggaatatcatattcaatcatacagcattgatctagcagatgtaagaccagaaccaatcggctgccctaatccggacttgtgatagatgactaatcataagcctcaggccaacattttcatgatcttcaactctaaaactaccatttgtttcaggccctttggtttttgatgtcttcactttgcacgcctcaaggcgaagcttctccgcctttgtactgtatgttttactgagcagaatctatcttgtggatgcaatctttcatgtccgctttccccatcgtcccattctcatccccccactcacccactactcaatttgccccatcgcctcgggacgtgttcatggtagtaagtcgggcggacacgactcaataacttgagagatggaggagagtacccttttcggcgacgacttgccgcttccaccggctcgacttttcgaacgattaggtcagttacctggctatacctgggatcagacgatcgaaccgtttcactcgacatacaatcactggcatatctcaggataccgtcatgccctggagccggatgttttaactcctcttgcaaattcctccaatcccgcttcctccggaccgtccagtctcacacgcttctccccgcgcacagaagctcgaccatctgcccgtgccttgcgaagattgagcgttagcgaaaccagcagtgaaatctcattatccaaccaacacagcctggagacagatcaaacatggttaccggtcatcgcacgaatctccacgaacattatccggctcgaacgagagtttcacatgcttaggtcaattgtacaatcgtcagatccggattgcaatcatacaatacgaccagtcgacttgatcaggctacaacccgatgacgggcactcgaagacgctgctggttgcgatttttgagtctccaggccatgataggttgcgagatctggtcacattcggccctgcctcatttgccgcagggtccaaaggcgaagacaacaatgacacccccagcgagcaggtctccttacaagccttttttgatttcgcaattggagcatgcgattgcttggagattctacactatggcctgaagacagtgcacggcgaaatcagaggcgatgcgttccatttttgtgcagagaccggtgcagtgaagctcgcgaacaccggaaacggtgctaggtcgtttgataacgttctcagcgagggctggtcctccgtttcgcgcgagcttggggccaagtacaagctgcaatttattgccccagagcagactggaaggatgcctacagagccagatagccgcactgatatttatgcgctgggcctctttttctggtccatgctggttggaagactaccatttgaaggaaccgatcctgttgatgtggtacaaaatgtactaggcaagagattggtaccagtatctgggaaacgaatggatgttccagatgctctctcggctgtgatccaaaaaatgacccaaaaggtggttcatgatcgctaccacacaatctcatctgtgaagagagacttgaccaatattgctaaattgctcggtgatggtgacagtgaagcattgagcaatttccaagtcgcgcaaggagacgtgtcttcctttttcactctcccaacgtacatgttcggacggcaagaagaatatgacaagattatcagtatcatcgaaaaggtgaataagcgtcaggcggctgccttggctaaatctggaacccaaagtcccggtactacgcacgctctcacgtcggcttcgtctctctctgaaagccgtatcgaaagcctcgagtttgcttctgtctctagcgattctggctccttccatatgccccctcgatcttcttcgaacgtcaccagttatcatatcgcacaggtaaacagtcatgaatctgtgccaggtagtgagacgtcgttctccactcagaagcatacaattgtccccgaggtgtatagtcaaagcccaggagcagcttccagcagagtcaagagcccatcgcattctcggtcttcccataacacagaccgcgatagtcaccactccatcggtcctcccagccaacaatcaacaaaccataccgttagtcaaccgggatcactgcattccttgaataaaccgaagaatagtgggaagtctcgccgcaacgagcgttgtgaagtgattacaattagcggtccctctgggattggaaaaacggaccttttaaatcggatacagccaacagttcgcaagatcggatgcatagcaatcactcgtcttgaccgagccaaacgtgtcccatttgaacctttcgcaaaactattggccagtcttttgcgccaaatcttctccgagcgcgatgtcaccacagattatcacaacagtgttagaatagccctgcgaccaatgtggcctactctgcacagagttttggatcttcccgatcagctgatgtcccctggcgcaaaatacagaccagctgaaaaggccaataactttctcatgccaactaagggtgagccatccaagcatgtcaacatccccgggctggatcaagggcagacttctcaagatttctttttggcaaatgccgcctcgaagaatatgcggctcacggagacattccttgagatattgcgaacgctgtgtcatttcaaactcatcactatttgccttgatgatctcgaacatgcagatgacgaaactttggacttggtaatgaaaattatcaaagcaaagctaccatgtgtcctcatactgtcaagccgcaaggaagagattccatctgcccaggtgaggtctttatttgtggaagatttaccggcgatcacgcgaatcgtacttgaccccctcgaagagcagcatgtcatggaacttgtagcagcgacaatgcaccagaaacccgatcaaacattgacgccactatgtgcggtcgttcaggagaagagccgaggaaatcccttctacgttcgggtaatgcttgaaacttgttacagaacaaactgtatttggtattcatggaaggactcaaagtggctattcgacctcgaccgaatatttacggagtttgtggctcctgtctatggcgaagggcttggacttggatttctcaccaagcgtcttcaggatattccccaagccgctcgatcaatcatggtctggggagctcttctgggcagcccgttctctttttctctggtacaaaagctcttgacaagtgaatttctgtattcgagcaatgacgacgactattatgatctcacatcaccccaagatatcacacttatcagacaatcagaaggtgatatagttgttgggttgcagtttttggttcaagcaaacctcttaaacacgggaaggaccgacgatgagtttaggtgaggcatctatgtttactactagcaaaaactcttactgattctcctaggttcggcaatgaacgacttgcacaggctgctctttctttgaacgagagtcgaaatgtagagaagatgcatttcatcgtttcacaagtgcttatgaaatattaccatgaccatcgcagtcgctattcgatggctcatcatgtggcacttgcgtcgcggactatcaagtctcgtgtcagcagacgccttgaatatcgtcagatcttatgggatgccgggcaaaccgctttccagtctggcgcgcggccctctgcactttggtacttccgccattgcatcgctttacttcaggatgatatgtggaatgatctcaaacccgacgtttattacgatgaaaccatgcggctatttatcacgacctcggaaatgtcatcctctcaaggtcacaatgatgatgccctccagttgatcaacgaggtgtttgttcatggcaaggacgccttaagcaagtcgagagcctggaccattaaggccaaaatcttcgctcagataggcgatcaccacagctcgatggattcacttctcacctgccttgatgagcttggtgtgcatcttcgtcaacctacaacgtatgaggagtgcgacgctgcctatcttcgtctcaagtcctatctcgagactgccgacctgagctctattgcccaaaagccagtttccaaggacccaactatagtgactatcggcgcagtcatggcggaggcgatgacagtcacgtactgggacgatgcattgacattctatcgaatggcgcttgaagtgatgaacattcatattttcaagggtggattcacacagatcgcaataggttgttcccatcttgccatgatcgcattaggtcgctttaaagatatcgaatttggcacaagacttagcgacctttccctagaactgctcgagctctgccccgaattgtcgactcagagcagaggctcgatcgttcataatctctacgtcagccatttacgtgttcccatggcatcaacactaccggccttggaagcttctctcgaggcttctttctcgatgggtgacccgtatcttaccctgatcagcatctcatcaatggccatgactcgattgtacctaggccaagacatggcacagctagaagctttctgtgtggagacccctgccgaaattcccaagtggcaccaagatacccgcggtggggctagtctcattgcagtccagcaagtttcacgtgccctgcaaggcaagaccgaattccgatctgccgatggtatcatgtcagacgccaatcacaacacctctgactatatgatgcatctggatgttcactccagtaacgctgacaggccccgtgacatctactggggtcttgccatggttccactgttcctgttcggtcaccacaccagagcaatccaagtaggtactcaacttttgttcaccaggcacaggctctggtctgcacgtgtgtcctacgtgatttgtttctatctggcagcctcaatcctcacttttcataatgacaatccctcccaaggatacctcgacgacaagatggacgcactcatggaatacaaggccgagatcgattttgctcgagatgcatcggaaacaaattatggcatgtgggctctaattctagaggccctgatcgccgaggttcggaatgatcatagcgctgccatccagggcttcgagtctgcaatcgaccactgtcaaatccatggttggccccttgaggaagccttggccctcgagctgcagggtgagtttttggttagacgcggagcaaagagggcggctcgtgctgtaattcaagatgccatcgcttcatggagctccattggcgccagtggcaaatcatcgcagctcgctgagaaacatgaatggttactcaagacggccacatcgtccaaaactgtggacgttggctgtcagactgttgattcacttcttgagatcagccgtgatgttgtgcaagaagagtgtatggtcccccagcagatggaagaggatgagaggagacaacaatggatcgagcaaaacggtgttgctgctggggaacgatctctagacatatcaagtgtcgggttagacattattgacttatccagtattctggagtccagtcaagtcatgtcatctgagcttcaaattgacaagcttttcacgaaaatgcttgagatcatcttggagtcttgcaacggttctgatttcgccatcattgctactgacttcgatgataacaatggctttgcaattgccgcagcaggtgattctgaaaagggccagaaatcattcccaggtggtctccctttctcggaaatggaagatcgaatggccttgcatatctcggactatgtcatgcgcacaaaggaagaagttcttgttcacaacgttctcgaagatgaacgattctcaaacgtcagcgagacctacctggcaaatttccccgcgggtcggtctgttatcgcattgccagtcgtgcaaggagatcgccttctcggcgtcattcatctggaaggaaaaccaaattggttcacgcagcgaaacgttgtggtcctgcatttgctttgcaaccaaattggtatttcgttgtccaacgcgttgctcttccgtgaaattcgcaaggtcagcgccaagaatgcttccatgattgaatctcaaaagcgtgcattggcattggcacgtgaggctgaacagaaggcaaagaatgcggaggccgaagccaagcacaacgtgaagttaaaggaagacgcagcaagggccaagtcgattttccttgccaacatttcccatgatctgcgtactcctatgaacggcgtgattgggttgtcggagctcctcaagggcacttaccttgacactgagcaagatgaatacgtcgaatcaattcgtgtgtgtgctgataccttgctcaccctcatcaacgacattctcgatttctcgaagctcgaggccggaaaaatgaagatctccacggttccactcaatttaaagcaaactatatcagaagtcatccgggctttgcgatacacacatcgtgacagaggcctagaaaccatcgagaatcttgataaggtaccaccagagctcgttgttcttggcgaccctgttcgtctccaccagattttcatgaacctcctcagcaacagttacaagttcacccctgccggatcagttacggttaaagcaagggttgcgcgtgagggtaaaggtcgggttcgccttgaatgttctgtcaccgacaccggtatcggtattccagacgaacagaaagctcgccttttccgaccattttcacaggccgatgcatccacggaaagatcatatggcggtagtggccttggcctgtcaatctgcaaagctataattgaagatgttctcggtggagctatctggcttgaatcgaaatctggagttggaacgaccgtgacattccacttggtcttcaacaaagcaccaaagaagacggcggtcaagactgcatggtcacaagatctggaaaatgcagacaaagaactacgtcggtcctcagctcgagatctcacgcaaatccctcgtgaccagattcgagtgtgcattgccgaagacaatccaatcaaccagaagatcgccgtgaaattcgtcaccggacttggtctccagtgtaacgcatacagcgacggcaaacaagctgtcgatgctctgcgtgcaagctccaaagaaggcaatccattccacgtggtcctcatggacgtgatgatgcccactcttgacggatataacgcgacccgcgagctgcgccgggatcccgatccaaatgtaaatgaagtgctagtcatcgccatgactgcaagtgccatcgaaggcgatcgcgagaaatgcctagaggctggcatgaacaattatctccctaaaccggtccgctcgccgattttgagcgaattattggacaggtatctcgccccaatgccgccatcctatcccaagtctcgtcttgctatccgagaaaagcgttcaaaagcaagtattgacggcagcgccggcacacccaccagttactcctcttcggcttcagatgagccgaagccgttgtcactggaaaagaaatgagtccatgcattttaaatttatacccaagttcgcaaagatagaagttaggcgtcatttgggtcgatgagtttatctctctttgactttttgttttttgcctcgtcgttcaatgcattggtatttcctcctttggtatttcttgtggactttattttatgataatcatgcacctttgtttcccgctcataatcatggtcaatggcatacttcattggatatgatccgatacatattctgaattggacatttgaacataatgcattatttacgtgtagaacatcagctatatacataattctcatgatatcagacaaaagcctaagcgcgacgaccaaagacgcggaaacgcttgacaccgccatcaggaacaagagtcagcttgacgtggctgaacacccgagtatcctcaccaccagcagtgagatcatcggacccaaagacatgctcggtgtctgcctggcagcgcttatcacccttgacgatctcaacccagttggcatcatcagccgagggcacaccttcaccagcagtgccagcaaccagaccgtgcacgcgcacagcgcgagggaagtttccacggaaatccttggtgtcaacaacaaccttggagaccgagccaggaaggcccagcttagcaataacccaatcgacgtgaccagcagcgcgcgagcgagcagtctcccatccgtcacccatatccttgccacgaccaggaagcagaatgttagatgagggtgtatagtgctcgtcggaggcagcaagagtcacaccgccattgagagcagacgagagctcttcaacgggggcagaggcagaggcagccggggcgggagggggaatggcgtggccgtagaggcggagacgggcgaagccaccgtcagggtacatcagaagacggaagtgggtgtagggggattggctgatctcgtcggataacttccatgcgcggcgctgggagggaccgcaaggtgaagcgggtagtagtgtcttccagccggcgaagctggggtctgcaatctgggcatctgtaatgccgctaccttccggtgcgtaagtagcttgtagctcggccttctcgccgtagttgccgacgaagaatgcggtgtctacttcgacgccgtggatagaggctgcggcaacgcccagcttgatcacggcccagtcgtagggatccgggttatggcggcgggtctcccagccatcgtaccaggcaccggtatgaatgaagacgccggggcgtgagatggcgggagtgggagttaggaggttatcaactgaagcgaagtagtcgtttgagcaggccaggaccttgctgtttaggttgcacgaggccaagttggtagtgtgtgcgaacacctggtcgatatcggcggcggcgacctgcattttgggtagagatttatggattatgcgtttcaatgaggtgtttaattgagaagtcgaagacgagggtgagtgtatacttaaatagcagagtggggggttatcgataagagccttgcccctcgaaatgcatttccattactcgatagtctccattcctcttcggtcttcgtctcatcagagccaatcagagcctatctttctcgatattccgttggagtaccgatatttggcgctaagtccagatccaattccggtttgagacctttcggagttgatttcggagttcgatcgttgatccactacatcaaacgccatatcggaggtctccgatgggcgccgttatctgaatggaagtctctcattgactagaaattatagtcacagaatccatagaaaccggaggaatggaagatgttcaatttgcgcctactgcgtctaccgtggcagtgagaagttgaaagaactttcctccgcgacctgcacagagagcccggagttcatcggaattcaacaattcggccaatgagacttgcaattggttctgctgtgctcagtcaccgacgacaataggacaatagccgccctgcttgtaaattagcagacggaagcaaaaggaacgggaatcaagtcaactgccatcgtgtacagggttctacaatgacacagctaccaccgattcccatatatcccgaacatctttgttcaaaggggacacccgagtcattttacttcgttactgttgcaatcttgaccgacctacttgtgtgacactcaacgaattctccctcgagtcagagattcagggttaaaatcaggtaatcaatttattgccttcagacaaagcccacaaataggcaagacggatcacgtgctatgaaacatgaaatattacccaggtcattcccaggctatgagagcagatatcagagttaaaaattgacaaagtatttcagcacaagcacatcaaaataagctatgaagcttctagaccaacgccagcaatgccttcgtatcattcaatatgatgggcgcaaacagcaaaagaaaaggaaaaagaagagaagaaaagacatttttgtcgctatcccttcccagtggtcttcgttgcagcattctccagggccgtatatctccactcgtactgtgccattgctcttttgtcgcttgcagaacggccttcgttcttgccactcaaatcctttgtgccctgcatctgtatttcccatcccttgaggattcgagcctgggcttccgcgatcgaagtcaggtttgagttttgtgaagccattcgttcgtcaatcgtggcatggtacgacaatttggcgcggaagagggccatttcgcattcgtcgtacttgatccctttcgcctcgggcaccatgttgtcttgtgtactcttcggaggcatctcggactggaccacgagagaaaaagggaaagagggaaatattgtcggtgcagcagataaactacttttatagccgtgttttggtaatggaatgtgttgggagtttggataagtaaagacaacggttttatgttcaaaggaacgaagtatgtatatctgtccaaacacaaagcgaatgattcaagagcgatgtcacgcctagaatacacctgaagcaaacatagaaatatagtggcgaaagggaaggttccaaattaaagagctgtaggggaaaatgcaagagaaatctcgatcaaatatatcatgaccaggtcgtgttcaccgtcactgtcgaaaggaaacatggaccctccaatacccgacatgacggatgtatcacactcaattcccccaacgctgcgcagaaaaggggcatggctacggtcaaacccggaaagagaaggagatcaaaggacacatgcacatacacacataagagacttctaacaagcccaacggtttcttcacgccaaaaatggttatttgtgcctctgaaaccgtactcgaagtaggccctacccatcccgtgttgagcggcgatgacccgtttgcttttggcaacagtgccatctgtctcgtgatgagaagccgagccaatcgatctaagttgccgccttacctggagcgttgggtgcaggagccatggtaacaccatgtttgaatcgtgcatgactttaggaattttgctagaacggtcgagcatcaatcggcagatgcagtcccgtctcggtccgtatggccgtgcgcacatctctgtgtatcaggatctgtagattggaagacatccgtgtctttttcagttgtactccgtacatttacatgttctttgatggcccaatggctatatgataggtggctgtttgtaccaaacaatccgacccggatcttttcagctgagagacaatcgaaaaagcctaccgcttctataccgatgccacgagggtcaattagaggcaagcaaccggattacacgcggaatagagttgatgtagcctgcccgtcatttccaccctgtcgtctctctcctccattatctttcagaagatctcaatatggaccattgttcgggtttcaatgtagagaagatgggaagagaaaccccctcgaggtcattggtatcaatgcagtgtttggcccagactataaataattagcaattcgcaagcaccattggcttttctactctacaatcagagacatacatacatcttcagtacaaaggataaaaaagaaaaatgcaaggccccatgaacccgttgaactatattcttcagccacgtagtctcttttgtcccttttctggcttgcgtcaccatccaattcttccaaggataaccatattagggctgcagagcacccacaccggctcatttgtgacacttgagaccgcaggaagcccgttgaccatttattttattttcttaacaaagcacatgatattatttgaaggctgaacccattgatcaggatagcctcccttctagagtgggctaaaaaagggacggagtgcaaaagggtcataactcggtacctgatttgtttgtacaacgctgcaggctgaaatttaggggacctatgggccgtgattgcattctggactggtggcgatgcatctcggagaaaagaaaagtattccgtgaggtatcccaacgggaaatgggccagaccgagaaaggtctgggcacttagggctcgtgagatcatctgatatcaaccaattgtagatctacaccacggacattgaagccaacactatccttttgggagtcggtaaggatacaaagcatctcaaagctcatgtttctggtgtctcatgtacgtttgagacgatagagggcggaaattgtgtaacggaacaagcacccctccggcgggtaggcacagggttatatcgggtccgacgcgtttcaaccgttccacattggtgcctttgtcttgatctatgtgtaatattgagagaggtctgaagtttgtttagattcgtcattgattgatttcaagatgaccagctctaaattttcactctaaatccagagagcttggagctagaacaaagacgggaaaggcacatcaaaatatattatccctttaataataaaaatggcttccctactactgaatgtttatcgattagcactgccctcctcattccggctcgccgccgctctcactttcttggccttctgaatatccaacgacatcttcactgggtggactcccggggtctcaaacaccgtgttgatctcctccagagacaaacggctagtctctgggaagaataaccacgacaagacgagttggatcgagttatacacgatgtagacgacccaaatcttataccccactttttggataccgacaccaattccgtaagtctgcgcggctccggcacctccttgaataagaccgtaaagacccattcccttggcacgaaggggtaaagagagaatttcaatggggtacaggttgtgcatggttgcaacaaatgtcgctgagaaggtctggtataggaaaatccagagaatggtgagcgcagccgctgctgtagtggcatggagactgtactgccacgaagtgatcgtcgtggccgtttggaaaacaatcatgctgataagacccacaaagatcatggttcgtctgcggaacttatcgactataagcgcgccagcggccgtaaagacgaaatagactgcggtggtaccgatgttgataccgagtagctgcttctcgctcttgatgccgagttgttgtaacgaaggaaccatctaaaaaggtattagtgactgagttaaggtggcctctgatctaaacacccacatagtatgtgataataccacctccattccattgctggaagagcgagtataaaaacaaaaccagcagtcggaaacgggccgccttggtgaagaaaacccgatagtcccaggcggccctgtagcccgtctggtcgttctcgagagattcctcaatctgtctcaccacaatgtcgacaattggctcatgtatgtcggtgctagtggtgtggtacttggcgatgacttccttggccttctgacgattgcccctcaagatataataacggggcgactcgggagttataaggtatattcccagacagacaatagtggggaataaagcctcaagaatgagaggaacacgccaggagttgttgccaggcaactcggtcagtccaatcatggcaccaagcatagcaagactaccgacctggaagcatgcgccaaaaaagcccaccataacaccacgcaggtgaataggcgagatctcgccaatatactgagagcttgacatgagcgaagtgccaaagcccatgaagaatcggccggccatgaatattggcaggttcgttgcgaggccttgcatgagagatgcaaagatgacaatggcatttccggtaaaattgattccacgacgaccgatcacgtccgccaaacccataaagggtgctccacagacgacaccaatctgcatcagagcattgatcaagccatatgtgccaccactgctcccaaaaccgaagtaaccgtgccattgatccaaagcattaataccgctgatgacaccccagtcgataccaaagccagcttggttacaaccatgaataaacatgatgaggcccagacggactccggtccacgatcggaggctcagagaatcctcagacagcttccacaggtcctcctctgtcactcgtgccagaacaatctcctcaatatgttcccgattctcgcccttgcccagcttagcctccgcatagccagcatctgaggccattgttgcgttttggggaactcgattgaaggaacttgaaagagtatggatatgatcggcccagtatggggttgagaacccttgagctatcaaattcgagccaattttgtggatatgccggggtattattgcttcggtgagtcgatcgcgaagccaggggcgacaaagtaatggtcggcatccataatgttgctaagcgacctatttcgccacggagaagacatgagcttcgccagattaacttgtggcgtgatgtaactgctagaatagatagtgattggtgagtgatggatgtcacgttgtacattttgtacgccgactcctgaaaagcctctcctcgccatgtaccctagggatttcccaccagtgagacacgagtgcgggggagactagcatcaagttggcaggagtatcgcttaaacattttcgcaatgttagtctggagtggtcgcatcgaccgcagatcacaaggacgatgataatctgggggagacatttagcctgaaatccggggaacggccggggaaagagttagatccggcgcttgttttcccgaatcctttgcacttggcaagtcgtatcggcttcttgactatcccactagctcctagctcttttgacttatccgattcagcgtctttcagcatgttctattcaaaagtggcggctgacggaccgaactgccgtcttgttctccagagctagtccatattgatacatccacccaacacagaccagaccagacccattgaaaatcattgaacatgtccgaactatggtaccaacagcctgcggaagactggaattccgccctgcctgtcgggaatgggcgcctaggcgccatggtgtatggacgcaccgacaccgaaatgctacagctcaatgaggattcagtgtggtatggaggaccccaagatcgcaatccacaagacgcgctcaagtacttgccgcgcctgagagaggctatacgtgcggaaaaccatgtcgaagccgaaaagatcgccaagctggcgtttttcgctaacccgatcagccagcggaactatgagccgctgggaaacctgtttttggatttgggacatgatcctagccgtgttacaggctatcggcgctcactggatctcgaaagtgctacagcacatgtcggctatgagtaccaaggtgttcgcttcaaacgtgaagtcttcgccagctacccggatgatgtgcttgcaatcagattgcgctcgtcgagcaaggctgagttcgtcgttcgcttgacgcgtatgagtgacttggaatatgaaacaaatgagtggcttgacgatgtcagtgctagcagagactccattaccatgcatgtcacgcctgggggcaggaacagtaatcgagcgtgctgcgtcgtgtcagttcgttgctatggtgatgagagtacaattaccaagattggaaataatctggttgtaaactctggtgataccctgctggtcattgcggcgcagactacatttcgacacaaagacattgatcaaagaaccaagcaagatgcagagaatgccttgggtctctcgttggaggatctccgctcccgtcatgtttccgactaccagtctttgtacgaccgaatgggattacaacttgggccgagctctcctgaggtcccaaccgaccaacgtctgaaatattctcgggatccagggctcatagcactctatcacaactataatcgctatctcctgatatcatgtagtcgggatgtacacaaatcgcttcctgcaaacctccagggtatctggaacccatccttccatccggcatggggctccaggttcactactaatgtcaatctccaaatgaactactggtctgcgaatgtgtgtaacctctcggaatgtgagcttcctctgtttcaattactagagcgcatggttgagcctggcaaagccacagctcggatcatgtacgggtgtcggggatggacagcccattccaacactgatatatgggccgatacagctcccgttgatcgatggatgccggcaagtatctggccgctcggtggtgcgtggctctgctaccacatttgggaccatttccaatatacatgcgatgaagagttccttcgtcggatgtttcccaccctgcgtgggtgcgtggagtttctcctcgacttcctgatccaagacaccaatggcgtatatcttgtcactagtccgtctgcttctccagaaaactcattctacgattccaaaggggaaaagggcacattgtgcgaaggatcaacaatcgatatccaaatcattgctgctattctggatgccttcgaatcatgcgcaaagagacttggtctcgaggatgcccttcttccatcagtccaagctacaaagtcccgccttccgccaatgaagatttcccctgcagggtatctacaggaatgggccgctgactatgccgaggtcgaatccggacaccgtcacatgtcccatctatgggccctataccccgggaatgcaatcacaccttcacgaacccctcagctggcagaagcgtgcggggaagttatacgtcgacgcgcagaacatggtggcggccatactggctggagtcgtgcgtggctgctcaacctgcacgcacgcttacttgaagccgaagaatgcagtgggcatctagacttgcttttgtcacggtctacttggcccaatctactagatagccaccctccattccagattgatggaaactttggtggtggggctggcattatcgaaatgctggtccaatcccatgagcctggggtaattcgcatccttccagcgtgtccgagaggctggactggatccatccggggagtgcgggcacgcggtgggtttgagttgaaatttaatttcaagaatggccgtgttgtaggtgaagtgactatatattcggagcgtggagagactgtagttgttcacttcaatgagttacaagtagagattactggtggtggtgagcataagatctaaacatgatagatgtgtcaatcaatagatgtcaattgccaattatatgaaaaagacatgcttattcttcaatatcttaaggtacttccgtactccaggtgttggcctcttccccaccgtcgcctatacccacttcgtctaacccctgcacttcctaaaccgtcacggagcaaatacccgcatctcccagtctcggggtaaattgaagagaacaatagcactttatccggatcttcttttgtgggcctcttcgatgagagctctaagctaagaaaataaattatcaacttgttcataattccgccagtcctaacataggcaacacagcaagatggatttgaactcagtgcaagatctcaaggacgtgctccgacccgacttcttccatggctacgccacagcagcagcccaaatagaaggcgcctggaacaaggacggcaaaggcgtgtccatatgggatacattcggccacacgccagacaaaatcgcagatggaagcacagccgacgacgctgtccgagcttacgatttttatcgtgaagatgtagcgctcatgaaatcctacggcgtaaacgcctaccgcttctccctatcctggccccgtatcatccccctcggcggccgcgacgaccccgtcaacgagcaaggtatcaaattctactccgatcttatcgacgaactcctccgcaatggaatcacccccttcataaccttattccactgggatatcccccaggccttggaagatcggtacggcggcatgctgaatcaggacgcctacacgccggactttatgcactatgcccgcgtctgcttcgagcgctttggcgaccgcgtcaaacactggatcacctacaacgagccgggcgtctataccctcgccgggtatgcagcgggcgtgcacgcgccgggcagatcgtccttccgtgagcgcaatgccgatggcgactcgtctaccgagccgttcaccgtcgcgcacactgagctcgtctcgcacggccatgtcgtgcgcttgtaccgggaagagttccagccccagcagaagggaagcattggtattaccctgcatggcaattggtccgaggcgtgggatgaagaggacccgcgcgaccaagaggctgcagagcgtgcgcgcgagtttgagatcgcttggtttgcggatccgttgtacaaaacgggtgattatcctgcctcgatgcaggcgcagcttggtgatcggttgccgaggttcacggaggaggaatcgaagcttgtgtttgggagctcggatttttatggcatgaatagctacacgactttcttcgtgaagcatacgacatctccgcctgacattaatgaccacaagggaaatgtggaaatctgcgatgagaataagcaaggtgtgtctcgtggagaggaaagtgataccccgtggctgcgggccgcgcccgggggattcaggaagttgttgaactggatctataaacgttatcagatgcctatttatgtcactgaaaacggtaccaccgccaagggtgagactgcacccatgcctgaggttcttaatgacgagttccgcatcaagttcttcgagggttatgtcggcaatgcgttggcgcgggctgtgaaggaagacggagttgatatccggtcttactttgcctggacattcactgataactggggtaagtagtggctggtttcttcgcatgaatatggaattggctaatactttcagaatgggccgctgggtatgcggatcgcttcggttctacatttatcgatttcgagtccgaagaaaagactcggtatcccaagcagtctgcctattatctggacaagttgttcaagcatctgattaaagacgcatagaatattgggagacagacaaatagttaacataaatgaagtgtctgtcatatatatatttgcggtaaacgcagcaacaccaccacctatataggcaatagatatatatcgtaagacaagtcatacatcggggtggactggagattactgtgtcaccaccaacatcctgtataacaccatcgcgtaaagcttctatttgttggaatctcgaattatagccagttagggcaagtcattgcgatccttatcagctagaccccgaattactccaactgaggggaactccgcctcggctgttgatattcctcttaaatagctggagatagccctgatagccttgactttgactatctgtatagttacctgcattgtgcatactcaacatgcagcccaaagatgagccaatcaagctgaagctccagggatctcctcgagaagtaaattctgccaatattaacatctgcatatgataactaagaacctcaactgactcaattaaattagatcgggctacagcatggccgagggttacgggaccaaatccacagccagatatctatctacgatgccatgttccagcatacctcaaatctagcctggaaagatgtgcgcgaagtcgcaactgaatttcagcccacacttcagaacctaacgcctgatctgtttacggagatggagggtatcgcagagggcgccgggttagatgtgcttgacataattgcgctgaactgccgaagcgagatagcgctaggacgattctccgatggctgcacggcactaagctggaagaaaagcgaggcgacgcgagtgctcgcgcagaattgggactggacgcagactgtcaagaagaatctagcgatggtatcgattgagcaggttggaaaacccactatctatatggttaccgaggtcagtattcctgtataggtctatattctgacatgtaattaactattctcaggcaggaatcgttggcaagataggattcaataccagcggcgttggaacttgtctcaatgcaatccgcgccaaaccgatgattagcagcaagatcccgatccacgttgcgcttcggttgtgtttggaaagtacttctgtcgacaacgccgtgaagaccatcgagtctctgggtggtgtcgcctctgctcagcatatcctttgtgcagacagtaccaaagccctagggcttgagctgtcgccagttggagacaaacatatctccgaggatgcatcggggattatcggccataccaatcatttccttgagaaccgctatgtgaatgagccaccgtggctgtccgggtcacctatccggctcaagcggctaggagagttgacgcaggagttaatacagggtggtgtccagggcgacactattaccccggctgtgttgcgagaatatgtcttctctgatacgtataaccagcctcagtcaatatgttgtcaggaggacccatcgcgtcatatctcaaataggagtagtactttgttcaacattattatgaacttggacctggagaatctcggcgcagaggtggtctttggccggattgggtctggagaggaagggcctgtgttgacaatgccttggtgaatgaatatcatgaaagaccgctggataggactttgtatctgtgtcttagatcataaagaagatgacaagtctttgtgctggaatccttttattagatatcaatattcatctgtgtttagaatacaaagaatatgaggatagtctttgttacattgtttctctttgaccatggactcaaccataaaagaggcctcatataccaccttcagatgtctcatcatccaccagctactcattcttcaggcaatcggctcaaaggtcataggcccaggtaagcctcataatccactctattcaataccatctagttcctaccagagtcatgtccggtcgcagtttccacggtacgtacgaagaagagcgccgctacttcatgaccacactgcacgctcagattgacattctcaaggacaactacaagggaagccgacatatcgttatcaagtctttgaatcttctccttctgcgagtcgaaggtctgcgaatgtccggacaagctcattttgaccacgataactctagttggacagtcaaatgtaacaggctctatgaacgggtgcagtatttcagggatactcttgtcaaggaccggaacagcacccgcaaagttgccaatgaaatcgagagtatgatgatatttttggacttttgtgtccccgcggatattcaatacaggattatgccagatcgaggggatcgaagtggtgccccatcgcccgagcctatgtgttgattgtatttagatcaatgaagtgattcagttggaattcgttgccgataatggtatatgtagtatcatagtaaaatggcgtacttatgagatttgtaatataggccaagcctagatatttcttttgccgaatcagctttgcaatggaatccctctcactggcgttttcagctcccggagatatgcggaccctatctcaaacgtcatcgaaagtgacgatcacgccaatttgtgatttgtagagaacattgagctgaaaaaacgcaataaacgcaaggatcattggccaccgccctcaatccctttctttgggtaatcttttcgccttttcttatgagcatctcctataactgccatggcctcggcaacaggaatccctcaagctcacccagtgacaattgaatcgcgagaggatgagcctctattgggccgtccaggcgatgtcacacaaaaggccgaggaggccatttatcggaaccttttcacaggtgagcgtgaaagctttcgatcgaaacccacgactgactccaaaatcaggaacagcaagtgttgcgcaagcagggatttggattgtaagagcattatgacctattcgaaaagatcagagaactaatgaacaaaacagctagccgcgttggtctggcaaggtgtcttagcccaacccctctcgctgttcaccccgcatccagtaagtatccatgtcgctgaacaaaatatcccaaagacattgactggaagacattcagctactcggcagctctgcccttcttcttcaagtccaagcagctctgattttgcaaccaaccgccaccccgcaacaaaagcgtacgggtactcgcatccactactcctttcaactgctcagcgtggtgctttttgtatctgcttttgttattatcgaggttaacaagggctctcatccgcactttgtttctcctcacggtattccgggtctagtcacttacatcgctatcgtgctccaagccgtggtcggtgtcatccagtactttgcgcccgttaccgtactcggtagtgtggacgccgggaagcgcatttataagtaccatcgctggagcggttatgttttgctactgctggagatggcgactatcgtggcggcgacgcagaccacctacaacttgatggcgattcatattcctctttggggtgtcgtggttgctgccatttttatcctcgctggagtcggtgcgaggattaagaagcataaattggggctgtaagatcgggattgagacgggatctgagagtactgcagactatttatgaagcgaatgtatgaagtttccgatgcaaatggagcaccagcctggggcagccgggtatgtagatcgtctatagccgtggaccagattcatgtgagtatccaaatctcgcatgatcatactcgttgcagtgtggcatgaatgagaaccgaacacaaacatttgcaaacgaatcttctcaggtatgctcatctcaagcctgataggcagtgtttaattcagactgccactcggggcttcctttggctcttcgttgatgagggtgatgtctcgttgcatctgtcatacattttcgtgatattcccacatgtatgtagacaagatactgacttcaaattaaacctcattgatgatactctggatattttgtcatacgttgtaaaaaacatgcagatcctcccaaaagggttaaggcgggagatccaccactacacattgcccgttctcttctcttcttccttcccaactccaatggcactcacttcatacgtctgcttcaattgcaggcattcatatggattgaaagcatcgctgcgtaatttttcctccgcccgacgcaatcgagacatcttgcgacccgggacagctccgaagccgacgccggacgtcaaacacatccgccaaaatgccgacctctacgcacagaactgcgtagatcgcaactatgcaggtcacgccgggtatccgtcgaagattgagcaattatcggaggaggctaaacagcttgattacgacctgaagacccctcgatcccgtatcaagcaactagaaaagaccatcgccaagctacacattgcgactcggcaagaaacagatgggaaacccaatgagaagggcctgagtccaagcgaggagctggctgcactcaagtcagaagctcagcgcctaaaagacgattcgcagtccatgaccgaacgcaaaacaacctgcaccgaagagatcaaccgactagccctctccctcccaaacctctcctccccattcacacccatcggacacgacccaactctcgtacaatacatcaactttaacccggaagagccccccgcctggaccagcctatcccaaaccgagctccaagcccggtcgcacgtcacaatcggcacagagctcaacctcctcgacttcgccagctcagccacaacaacagggtggggctggtacttcctgataaacgaaggcgcaatgctggaacaagcactcgtccagtacgccttgagcacagcccgacgccgaggctggaaaaccgtcgcaccgccctcgatcgtctactcctacatcgccgaagcatgcgggttccagccacgcgaccagcacaacgagcagcagatctggtccatcgaacagaacgaacgcgacagaaacaccaagccccaacgctcgctcaccggcacggccgagatccccctagctgccatgtacgccggccgcgacttcaacccctccgagctaccgatcagactcgtcggcgcgagccgctgctaccgcgcggaggcgggctcccggggtgtcgacacgaagggcctgtaccgcgtgcacgagttcaccaaggtcgagctgttcggctgggcggatagcgtggacggagccgtcccgagctcggagggtatgttcaacgagctgctggatatgcagaaggagatcctgacggcgctgcatctgccctgtcgcgtgctggagatgccaactggggatttgggggccagcgcgacgcgcaagcaggatatcgaggcgctcttcccgtctcgtctgcgcgcggcgtcgggtggtactgctacaccagtggatcctaagattcatcatctggagtcggcttggggtgaggttacctctgcttctatttgcacggattaccagagtcgtcggttggcgactcgggtgcgtggcagtggcgctaaggagtcaaggttcccgcacaccgttaatgggactgctatggctgttccgcgtgtgttggctgcgatcttggagaatgggtgggatgctgagcggggtgttgttgttattcctgaggttctgcggccttggatggatgggatggagagtattggtcggagctaagctgaggaattgatctcgctctcgtagagacactgtatattatgtattttttatgaaaatggtggacatatatttatttcattccgctctctttaatataaggatacgtggttatcttcatggatcttgcattgtattaactgtgatcttttggtatatctaaaaacatagtagacacaaaaatgaggtcttcaaagacctccaacgcctgccttgttggggatagagcacaggattaataaaaacagaacagaccaaagcagggtagagcaactcatgacttcgtgaacacatatcagaaacaaggaaacaacataaatcaagtaaacatcacatcattgcgaaatcacagagacagggcacagagacaggggtacaatctggtctctttcgtcagacaataccagcagcctgagaagtcaaggtgcagataaaataaacaaaaagaaataaaacgccctcaaaaactccaagtagagcagaatatccaaagagatgataattagcgcaatttgtaaggcaaataaacagatcccaagaagttgccaggctcatttccatggtagatctatatcttcgacacgggtgcatgtcagatacggcaatcctgtcggagtattctcacgaggaccagcggtgccagtggttggttgatctgggcttttcagctccaattcgagaaaatttcgcatcagcggcttgacgatatcgcgtgccagccgtttcatctcgtccatcttgcgctcgaagcgcttgagagtctcgcgcgtgtaaagcgagccagaggatgatgtaggatggagcttgagaaagcgctttagctcttcatggggcaggtatgcctgcgtggaagaggagccgatcaatctatagatgcgcgcggacgggtctggggaggttgttggtcgagacgggcttgtcgggtgtgacgctgatgcggtaggttgaacgggaccatcgcttgggcccgtgtttttaaggatgggagctggcggtggcgtagtgctttctatcagccattggcggaataaacacacggcgagccagtccaggtatgcgtttgagggaccgacacgttcaccacgcgaggtggttagggataggcgtaggagcttggattcaacgcgagctttaagctcgtcgagatcttctactttgtcttcgatcaggtctaggagtgagtctggtagaggcgcgtaggagccgtttcgcaaactcggtagggcagcgggccactggccgacaacgtggatcaaggcttcggaaaaaatcacccggctgcgggcgagatatcccagcttcaggtagctgggtggatatttggcgatctgtttgaacagacgagatccaaaaccgagtaagtggtggtccacgcgggaccctgtcaccggaagcgcgtcatacatatccgccaatgcaaggagggatttgcactccgtatatgccgaggcgatattgacactgttgataatgggcgggtgattgtagaatattcgtagtaaattgtcatagtcacgtattaagggatcgaccgcaacggcgtgctctccattctgcggcaggtgcgctaccgactgcatccctgccaggttcgccatggatcgaaagaagcctgcctgggcgtttgacggcttggtcatagttgggggaaatgcagtttggtcgccactgaacatggggtcataggttggttgctgtttcagcacgcggcattagcattgttcgcagatgggagtatgcgacgcgccggcgcaaggtgtaccttttggacaaggattgcctcttcatcctctgcgcgattctcccagtcaagttcataccgccagcgtctctttcctcctggtcgcgtcgagagtccaccgttatcagatggtgccagtgttgacccgttcgagaaatcatcatcctcactcagtcgcgacagcgtcccctccggcttggatggacacagagccatttgccgcgaccagttttcattagtgctcgcctcgaagaaacccgaacattgtgataatattaatttgtggaggagatagcgcctttcctgcgatccggcgcggatcacgacctcggtgtcacctgtgtacgtgaagatggggaaatcgttcgaggatggatgcgaggagctgccatggtgcgagcgaccggaacggtgtcgtctgtttgagggacgcgatattagggaagccgtactttgggcggttgtgcgatcaacgatctgtgcttgggacaccatttctggggatttgttgacatatgcgaaccgggggtgctcaacacctatcagcataagagagcgtcatccgaggccgaggatgaaaattggagactgtcgattattgtataacagggaataaataaagagagaagaataaaggaaagagatagttagaggtagaggttaaggaagagaacggagtagttccaaaggctttccccgccgccaaaagaagtaaaaagagtatagaaggactaacaaagtcatacactgttatttaaggagtgagatagataaaatagatcctgcaaaggtccccgtttctatcacaatccagttacaactaaataaacacgaaactaaaatattaatagcagatctatggatgtgcgctgccgcaagcagctgaattcgataggcagagggccaattaccaatgcgacaagttatagcagaagacgatgaaaacataaatagtttctcgttatagcttcatatttatgttactttgatatgaatactacatcagacatgctattataaaatactactacctactaagtaacatcggggcttttcatttcttctttgcctcctccactttctccccttttagcccgtctccagtctggcctttttttgcctctcttctctttcttttcgttcaaatcccctcagcttcttctccggccttcttcggtgcttttgagttgctttttggttcgaaaaatcaatcaggtggactcgggagtatacggtctgacaccctatacgaacgctacttttattgcgacgctctgttccacttcctcgacgcccaacccccgcgatcccctccaaaaatctggccctggacacgtcttctcgggacagcttctatagctgtcccgatctgtcatcactgcagataacgtcagtgtctgcagattttggcagcgacgtgagaaccgacccgtctccttcgcgctgtccttccttcgagtctgccccacacaagaaacgctccaaagccaaagcagtctcgaggacagcgcgcggtgtcatcggtaaagtccgggcattccagcgtatcgctgccgctaaaatggcgcatccgactattaagatcgacaccagcgtccaggcgaccaagcgcgggctacccgagaatgacgacgcgggcctcgatatactcggtgcgaatcaggacaaccccaagctggaagctggaaataccgaggatgttccaccgtttctatgtcaatctgtctcgggtgagtgaggggtgcatcaacgtctatcggagaatactgcacgtggaatgtgactgaccgcttccttatgcagagatccatgacaagtttgaagatctggaatggatacagacctcacgtttcaccgagggtacactgtccaatgatgtcttgcatccttgggctatagaggcagacccgaaggtgaaagagaggaaccggtatattaatgtccaggcctgggcaaattgtcggatccatctgcgggtggccgagggcgagtgtgattttatcaacgcgtctccgatcatcctggaagacacggtgacacgagaaagaaggaaatacatagcgacccaggtaggttgcgtgtttgtcgtaaatattttatggttcacttaccattaatcagggccccaaacttggacatctcgcggccttctggcacatggtcttccatgaaagccaggatgtcggcgttattgtgatgcttactcaaacttttgaggccggccgggaaaagtgcgctcaatacttcccattggatacggagcaggcttcgatggtactattggcggatgagtcggacgttctcttcgatgagagtgagcagacagaacccggtatcttgggtaaggttaccttgttagaatcaaccttcgacgctaaatcacgatctgaaatccgtaaactcgaattggccatcggttcggagtcaaagattgtctggcatttccttttcgctggctgggccgattactccaaacccgaaggcagtgatcgccaagcccttcttaacttgatcaagttgtcagcctcaaaatcgggcccggataacccgcgaatcgtgcattgcagcgcaggagttggtcggactggaacttttatcgcgcttgaccatttgctgtgcgagttagaggcagggcatctgttggatatggaacatccagatgccgaccctgttttcgacactgtcgatcagatgcggcagcagcggatgatgatggtctacaacgagatgcagatgcagtttatctacgaagtcctccgagaacaaacagatcggaagctgggcaagattacagactggaacacagaatcacccgacggcagcgaagaacggtctgcgaaaatggccaagctcaatgaccagacagattacctgccaacctccaagccggagttggaagctgtccatactcatacgccgaccagaagtcggtccgccacaccggagctttctgatcccgataattaatgacgcccgctcaatctccaccgttcttcctaactgtgagcatggactatggacgagaggtttatgtttatgttgcattcattcatggcatccggtgtttacttggttctgaattatgccttgttccaaaccccctgctatgtattttttttctttttgttgaaatacccccgttttgttactttgatcattatcttggatgtagttatactgcttattgagtagcactgtcagtctcgccctagggtcactgtatattagccaattggtgaaagtgtatgctttgccgactgctctgagacattctactttcgccgagtaaacatttccatcataggtttttcgggatcagattcgttattggcattgttaaggctatgtagcacctcgcacgaattcctagtaaatccacaactatacaatcctttggaaataattagaaattctttgcacccttcgcatatcaccgaccatgtgcttgcccatagaagatcatccatcccatcacggcataatataacaataaatagaacaataaaacaaaatcgcagcactgctgagcacaaatatcgagattggtatcataccgacgtgagaagaagacatgaaatccatcatcataagaacagggagtatagcgaaacaagatcagaatacagcgcatatatactcctttccgaagcacaaagtacacgcctcgctccggtagaagtatcttcaatcaatgcgttttgccgcagcagggattgcgaccgactgaccaccgacagagccagcctcatgataactgggaggagcagccactcgctcggaacccggcgcttcttccgtatcccaattctcaactgcattctcgtcccaattatcgacttcctgctcaaggctcataacaccggattcctgtgggcccatcacttctgagtcgcgacgggggtccccggagacgccaccgagctcgacgtcctcggtgccctcctcggtgagcccataccggctttgtcggcggcgttccatcatgcgccggtggtaccaattgcaaattccgatggcgccgacactaccgacaacattggcgacaatatcgaatatatcaaagtctcgaccatttggaaggaaaccctgcacaacttcagagccaacacccagccctaatgtgcagaccacgagggtcacgtgtagcgtgcgccgacgggtagtgtccaggacccagtaaaacgttacggaaagtaggaaaaaggtgacaaggtggaggaacttgtcattgggttgaagctttgttggtatcgtcgaagatgtgctgtgtggaagaagaccgatgtagccggctaagaaaagcaggaagatgaaggcacctgaagcggttagttaggtgatcgccggaaccagaatggtaagtcagtaaagcttacctgcgaaagggtatcgaatgcgcatggtggtcgagtaataagtaagtgacggagaagtgagaagcagatttggctgggtctctttttctggtgaaggtgattgtccagtcttagttgagaaagccgtcaaatgtggaggagtttggccgcagctgatgccttgtgcgtcatatgcggagcactggggacgttcaacaacaaagcagaggcgaaagcttatacagaaacacagaatccacggtaaactcaacacaagaccaatgaggaatgatagattgaaacagctcaagatgtgaacaatagcgattgatcgcgagtcggaatagtaacaatgagacaagatctgccggttgactccgccttcatgtcctgtacttcatccccgtccagagaaacttccctatgaagctcccccggaccttgttcatcaaacctctccgccacgctatcattttttgccattttgacatcttgggtcgattgtaccggcggcgttttctatctctatgccttttgtcccttctccgacccctgtgtcgcgtccgatcggcccgtaatcctaatcgcggagaatcgagtctcgcccgccccagaaacggggttttggagcgagcatgtcgctcggccacaacgcctggcctccgggcaacattcggcccccagatgatctccaggagtctccccgcccagtcaatggcttggtaaagactttatctggctcccggacaccccaaatacgcggctctgttggcgccgaagcgccgaaccccagttcgatatccgaagccgatatcgcgcccgaggaggatccgcgcattgctcaattccgagaattgtatcgccgcagtgaggcgaaaataaatgcgctgttttctggacgatattcgggcgataaccctgcggctggggaagctactgagtcgtccgaagcccaacccgaacgcgtcgataatgcgcctcccccttccaccgccccacggaagtctgcccgaaaactcgacgacgatgattacgatgactatgacgatgatgatgacgaagatgaggaaatggacaatgctgttgaatcacctctggaaaccaagtccgccgctgcatctcaggagcctagtggtgccgcgccattagcacgtcgtcccagtacctcgatatccgccattgcggatgggcttaaagaacccaagaaagagacaatggaggatctccggaaacaactcgaggaagacaaaaaagcaacggaggaggctgccagaaggagtttccacactctattctacacccttgagaatgatagggatgccatgcttgatcaacaacgattggaagagtcagaaagacaagtcgaggcagagatatccggccaggctaacatgggtgccaacaatgtctcgggggcttccaatggctacagttccttgagtaacaccaacctcggcgcttccagtttgactctgaagaaccttatcgcacgaattgacaagaagcgagaccgggtgcaggcatccgatgctgagttgcggagcttgctgagtgaagttcgcaagaatcgcagcaaatgggcaaacgaagacaaggtcggccaggaagagctctatgaagctgcggaaaaggttcttagtgagctcaaagctatgacagaacattcaactgcttttttgactcgtgttaacaaacgcgatgcgccggactatcatacgagtaagcggccctttcaccgcaatgatttatttcatctactaactttttactagtcatcaagcacccgatggatcttggatcaatgaccaaaaagctgaaaggcttgcagtataggtccaaacaagacttcgctgatgacctcaccctcatttgggcgaattgcctgaaatacaacaccaacaccgaacatcctctacggaagcacgccctttacatgcggaaggagaccgagaagcttgtccctctcattccagatattgtcatccgagatcgtgccgaagttgaggccgaagaacgtcgactccagctggccgacaacgacggcgctgaggagagtgacgatgaacccatcatgtcttcgcgaggtagaaaggcacccggcaagaagtcttccaagaaaggaacagccccttctcgtaatactcccagtccttccagggctccaagcactcagccaactgcgccagctcgcgcagattcggacgctaccggtgaagctagtcaaaatggatttttcacaccacctcctgcatctaacacttcgtctgaccccgctggtctaggggcgatagctacaacgagccaggatgattcgatggacatcgacggtccaagtatgtcgacaactgcgctcagtgccatgtcagtttccggtggcgttgaaccggaagaccccgagtacaaagtgtggaagcaagtcaccaagagagacagagcgcgcgttgcggcggaacgacatcgtctcctccggggggacaagcttaactccgaagaacccgctttactcagaagtaaagctggcatgcgccggtggcttcgacatcagaaacaagctactatcgaaacagacaagtctcgcgatggggattctcaagccatggaactcgaggccgcaggcgagagcctcgcagaaggtattgaggtggaagaggatcagatgctgccttattattatgatgtcatgtctggtgttcctgatcttcctgaccggctactctggaaggaggacgcgcaaggcaatgttgttgatgcctctgaagagttccttcggatgcttccaacaggtcaattcatccaacccgatagcaagttgacccgcaagatgaactcgaatatgcggcagatgcaagaaactcgcaagatctgctcgaagattggcatcgtcaagcagatgcagcttcaatctcaggtaagcgagccccatactctactatgaccccagctctctgctaacttcttttctagatgtaccaaaatcaattccaaaaatatcagcctgagccatttctcgagcaagatatcgaaccacatgtcatgaatgacaacggccctgtcattgccccctgggtctgtagggcagcattgcagcgctcggtcgctaaagttttctatcacactggctttgaggaataccagccatctgctcttgaggcggttaccgatattgccgctgactttttccataagctggggtccaccttcaagtcttatatggaaacaccaaaggttcctaccaccgagtcacatgaagctacgccttcagccgctgaatggaaacctgcttacactcgttccgaaattgttctgcacaccttgtctaccgtggggattcatatagatgaactagagtcatatatcaaggacgatgtagatcgtctaggaagcaagctcgccactgctcatgatcgactcaggtcactcctgacagaactccttcgacccgctcttgagggcggcgaagatggctcaaacgcatttgccgatggcagtgaacagttcgtcggtggtgacttcgctgaagatattgatgaagatttcttcggtttcaaggaactgggcttggatcgggagtttggcctctccactcttagtgtacccttgcatttgcttcaaaaccggatgttcaatgcggccaatccgcaaaacacgagtgtttcaccgaccgttactcttttcgctcctccacccccatatggacgcatctcaacagacaacttttctcaccaaattggactcctgcatgagttcttcaagggcaagcttgacgcaaacggtgatgaacctcttgtggaggacctagagctcccccccaagcagcgacccatggggatcaaaccccgtctcccagcctctggcaaaatccccatgtctagtcacctgggccttacatccagtccgcataaacgagccgctcaagcgatggcatccaaatctggcggcgcagagccaagtaagaagaaggccaagaagaacattggggtggccatcgaaatgcccaacttccaacccgatggtgaaggcgaccaagctactggtgacccggccacaaattccaatatgaagaccgaagaaaccggtctcgttgatggcactggcgaatccatgaccaacggagcgtgatgtataacttccgaggtcaggtaggtctatggttgactacgaaaatggccatatcctttccttcacttcctttccttctcttgagtcgcatgctttactttcgcatacctacctgcatttttattctgatcttcaatatctgcgacccatgtctcacgacacggctagacagggttgtgtgtccccttgccacgatacaattgacgaacagggagcgcgcagtaatatgagccagtattcattatttgaccattgcaggattgtatctttggatcctcaaactttcagcgacacataatccagcccttgtattctaccagtttttcttggttttcctttcccttctctatccttggctgaacggcagagtggacaattcccctttcagtctttgtatcataacatcccttgatgggatttcatttatagacggaatgtctattcagattcattcaatttagacctgttctcctatgacttaaatcttgtaggtgccagctcaagcaaagatcaatgggtagctcgacctgtcaatcatagatgtgacaagaagtgaggacaggagctgttccaagatgatgactccaccgaagctttatggaatgaatattttagacttgttagagatgtccaagaaaggaaagaaagcaagtcaatccaccaagttctattccacaatggaagactactttttctgtatcagaggttactatccaacctctaactacttgaagtgtgttaaataatggcataggagaatgaagtattttgggcaaaggggtttttttttgtattttctgggttaacaacatgataaagtaaagaaatatgaaagtatttcgtcatgaactggagatcaacctcggtatacaatcggccaagttgtttcggaaaacaaccgcccattaaaaccaggtccagatcatgcagtgtacatagacgataaaatagaaaacgaaagtccaccaagataaaagagaaaaaggaaatggaaaacgtaggcccattcggaaatgcatcgaagagcgacatcacagaagcaatgccgacgatattccgttcgagcaataacgtaagaaaaagaagagtaataggaaatcagttcgcagatagagaaagccgagtcatgagatgcctcgggagggatggcggacaagagtgaatctcgttcccaaccatagaaatgtggcaagttgaattagatgtaccacatacccagggccagcctgtttaaggtgccttcaatgggaagcaatctcttggctcggggttccttgggcttcgggtttgtcattttcacctccgggccactctgggggccagaggtaataggaacatcctcgtggtggcgagcacgaaccgaaatcaagtgggcatagtagattgctgggtgtacagacacagaggttgtcgagcggatgtactggtagcaatggtcattgatcataccctcaaggtcattgggcttgagacccatctcatccaacaggacatggtaatggactgggcggggagttccttgcagagcaatgtgtgtgtagagcaggaagtcccagtcatgtgggctagtaacatcccgatcaataagagtgcccggcaaaggagctccgtgggagtctgcggctgcgcgattcttggggtcagggaacgctcgaagatggtggcgcttgttggcaaccacaacacacatcttgcctgcccagactggctgaccacatgcatgtgcaattgcaaagcggattgcagggacctcctctgaaagaattctccggtattcggacgcagaaacaccgtcacggaaatagtagacatactcaggagccttgccgcccccaacagtcgctttccactcagcaaccatggggtgcaggatgtactcgatcactttatcccggataacctcaactcgatctccattagtctcgcatccacccatgtagcgagttgcagtggagtttgccgaaaccgacatggctgccaacgacggggtccacacacccatcattggatgagtgacgtctgcaccaatgatcatggagcctgggcgtagaccttgactctttgacttggggacagcccgagcagtgactccaccaagctttgcattcaccttcatgagaacatttgcgtggtattgaggtctattgctgatgcagtgtgcagattggagcacttgagagggggtgccgtaccggcagtcggaagacttcttgagacgaagatagacccaggagtccttgtcgggaacgatgaagaccatgagctgtggctcactcttgttctgcgctgcgatcgcatcgtacagctttttgacactcatgccaacgtcttcgctcaatcctttgacaaccggtcggccagtcacatcaccacccatgctcttgtacatcttgacaaactggtcgacccagttgagggtttggtcatggctgattgactttcgatgtccggaaaagaagccaacaccccaagcctggagggccttttcattgggtttgtaaaacttcttaccgcggagatcccaacttcccgcatgctgcgggttgtgcttgcggttgcccccgaactgaatctcaggactcggaagcaggcgagcctttgttttgatcatgtggtcactgatcttcataccgtaaagcttcaggatcgggtcctccttgtgctggagaagttccttggactggcgagcattggccaaacgcttcggaggcctggttgcacaccattggatcatctgcgccgcctgcatatcggtaagtttgtagcggtatctctgaaggcctttgatgactaggaattcggctgggtaatgaacgtcttccttcaccatctcgaccaagagcatattgggatattcgaggcggatgttgtaccgtttcatgaagtaatcttgaagatgcatccgagtagacgtcccagtagccttgtcgtgatagctaatgtaaaactcattgggctttgcgtgaatcaggcccttgacaatgaagcttttcatcttgaaaggacaaccctcgtagttgggtgccactcgaagaccttgaattctcttgttcacctgtgcgaagtacctcgattccttcgtaccgccaaattcgtcgcgggttgactgtaggttcctgaccagggtcgacttatcgttccacccgttcacattcatcatgtaccccataagactaatacgagaaaagaagacgcaatgagcgacatcaacattgaggatcagaccttgctataagtaaatgtcagtataccaatcttgggttcgaatcaatggattgagccttactggagttggcttaattgcctggtagattcctcggtaaacggaagcacccatgttggcgagcggctggtaaaactcctgcttcagctcctcgtcgtctccaagcttgtcgaagaagaaggcccgcttgattgcggcgaactgtttggtgggccattcacggagcaaatgatcaaggaagcctatcattatcagcctgatgaatcataaacagaggaagatgcggaataagggagcacttactcagagattcaatcacgagttgatccagatcatggcgattctgcaaccaggagttgatcactgacagattgatcttcctcttttgcatgacggacattctgaaagtaggactcgtcttgtactgattcttagtaagagtcttgacatcccgggtaaattcactcctgaagtcaataatctcattccagtcatcgaagttgcgtagcgacctgcaacacaggttagaaaatatataacagcaattcgatacattgcacttaccagcagattcttccaccatcccagataccatcagggatgtgtgcctttcgagtctcactgttccagcactttctcaggatccgtctgtcggtctcgttctggtctccgtggagaacattgatctaaaaattgatgagcgaagaatggcattagatggagggggaaaaacactcacctcgtactggtagacggccttgtccgggaaagaagtgatcgggtacgcgttcatcataacctcaatctctttgccggaagtgttgtaaccaatccgacgctggatttgagtctcctccggtgcagactagacaaaaaggttagtaaaatccatcaaccacagagctattgggaatgacttacagaagcaggcatgattttgaatcgatgccaaggaatgtcaatgttcttgcagccatcccatacaaccgtcatgtaatcttcatggtgctcaaccttctcaaggtccagtctgtgttgttcaaaaacagccactttcacgccttctcttgcaaggcggacgtagtttgccctttcttccgcggtccagttttccggaaattctggaggggtctggactcgacggatgggagagtcactgctactagaaccagtgctcttgggccgtttgtactcgcccgcatcagggtcatagttggttcgacgcatccaagcagtactttcttcttctttcttgcgccgtgcgtcatcttccaatttggccttgtggtcacgcagctcttggatctggcgcggatccagaggctttgccgcaggggtagaaaggcgcagaggaagacccctagtttgacgggaggatgaagaggagggaggaggctttgaagacgtattcatagcagcagtaggaggagggcggtgcccggaaagagacctctcctcctctttgccctctttcgagggtggcttcatggcctttttcggagccatgatggacgttgctcctattaatcgacctttgttagtcgctgttctagttcacgtctgaaattgcctgcaatggatcatagatgtaaagcgaccaagtaagatggatagatcaaagtgaggtggtactgctcagcgatatcaagtgaagtagaaaccagtcgctttcattgcacttggatacagtgtaggagaggccagagtgtaaaaaggatgatcacttacaaagtcaaggattgcagtgagccaaggatgatgattggaaaagagggaaaagagaatatggaggggagcaagaagaagagaaattgaaatggaggattcgtgggatcactgggagagaactgcgttcaacgttaacaggggctcacaggaagagaaatgcgttaatacgtttaacgttaaagtggcaaatgtaccttggaagtatgcagatgatggcaggaatccaagctactaaagacgaagtaaagaagagtgatggagaaggaagaagaagaaagaaagtagaaatcggcgaaggggtggttttatagaaaggttagggcaagcataaagagcagatgtattccctttaaggtatgaattgatattgtatagcggttgcctttttgaccggaaattatatgtataacctgttcaatggtaggagcaagccatagagatgcctaatatagtataatatcattcgcaatcacaaatgcagtcaaagtccgcgctacgtgacgatcaggtaattgtttatactagtgtttgcctaacaaaataagatattcaagactcagatatctcgcacttctagttaaaaacagaactgcggtcaaagtccgtgctaaatgataatatggtacttgcttatactaaggtttgcctaacaagatgaggtatctagtgcttagatatctcgcacttctagttagagatagaactatagttgaagtccgccatataaccataaggtacttaattatgctagggtttgcttaaaaaagtcatgtacctagtactcagatatctcgcacttttattcagaaataaaggatacagccacccatagatcagaccctcctgtctgaatctttagtaccgccttcctaattagttgcgaccaagactggtttacatagtaaaatgagatgcattttgatcagaaaaaaacgtatattctacctcacccctatgggatttaacccttgccgatgaagaagctgattataaagcaagatatgacaggatttaattaggggtttgcatacaaattttaggtatctgctgtcttgctcctatcaagaggagtttgatataaaagcggtgtaaaagttggaaggcggtataggccaagtattggtaggtgcctagcccaattaggaaggcgatacttgaatttcagacagtaggtcaatacccaaaagatatctcgttcttaaaagttgaaaagggatatttcaatcagaaagaaagaataaagaaagaattacaactgttgtcaaagcccgcgctacgtaacgataaggtacttgtttgtactagggttggtctaccaatattaagtaccctagtatttcgatacctcgcacttctggctgatatgtcaaaaaagacatcacgcacttacagtcaaaagacatagaaattgatcaaaagaaaaaaccataaatgctgtcaaagcccgcgctacgtgacgataaggtacttgcttatactagggtttggcaagcaatatcaagtaccctaatacttagacgactcacatctttgattactatcccaaaaccgctattcaaggctcaagatcagaaaacttgccccatttccgccgcatccttaggctgcactggtctaatacaattattcgtcaataaatctcttcataactacatggtcgcaatacaaagggcattcaatctgaatttctttagaatatcacatagacgaagtatacgagttctccatggacctggcgactcatcataacatctcttccgatgctactaggattcatcacaatcatggccatggaggaaccataataaggctacaaggccacaaccgtccttgctagggctctaggcctactttaaggagatggtgcattctacctagacacaaggatacatacagttgtgggcgtggtagtctacatatcgcttgatagccggtctcttggtggcattcctttgctaggagccattcattctccgcatggtattggataaggcacacttccttgttctggctgtcggacaggtcgaacaggatctccccacagtcgacaaattgttccgagatagggctagacagctgacagctagtcagaatgcaaacggactgaaggtacaaccctccaatcgggtccctctagctgtcaacttctgtctagtagaagtgtatagtgtaaatttcttgaagtagcccacgctttattccgacttgatctctatatcactatatggtctatttgaacaacaaatgatcaggtaccttttgtatgtgtatcccatagaaaaggtacatgtgcattagactagtttttgcgttcgacccgtgaaacccaaaactccacttcggcgtttggaagcgttggaccgagaactccgtaccattgtcctgataaattggggattagtggcttttttgtacaggcaccaagcacttcaatgtgtagaagatatttacaatgttcgttattttatagcgacctgacatatccaagtgggtttctagatcttaagataagacaagaacagccgatatgcaatctttgtagaaacaccgaatacagcaaactgagtataacttacgatggtggagaatgcagtgacagctgaccaatggcacaatgaaaacttttctacacgcacaactgctctgtcgtaggcaaacacctccatcctttttatcctcaaaccccggtgataactgtagtacactatgccgccaaagaaagcagtagaagcgccgacgaacaatgtcgtcgccttcgggcgcgtcaagtccaacctcaagatgggctgtgtcggcctaccgaacgtgggcaagagttcgctgttcaacctcatgacggagcagaacgctgcggcagaaaattacccattctgcaccatcgagccaaatgaagcccgttgcatcgttcccgatccaagatatgtatgtttttgccttttctcgatttctgtgtgcgtttttccacgtgatggatcttacccttcccgggagaggctctttccatttttggtcacttcaagtacgatgaacccctggctaatggaagataggacttcttgtgcaagatctggaacccgcccagcaagtacccggcctatttgcaggttacggacattgcggggttgatcaagggagccagtgagggagccgggttgggaaatgcattcttgagtcatattcaggctgtggatggcatgtaccacattgtccggtgcgttcgtggcgggaacttgagaaatgaagcagctacttactattacacagcgcattcgataacgatgaggttcttcatgtggatgactctgttgatcctgtccgcgacttaggtaagcatttatccctgtccaggtgatgcaggagaaatagacgctgatggtgctgcgcacagatactattcagagcgagctgtgtaagaaggatttggatattctcgccaaagctaagattgccgaagaggcaattgtgcggaaggctggaggaaaattcaagatgctgccgctgttcgacgagaccactgctaaaatcaaggaggtaagtcacgatttctcttcgaagagatgtgtagtttgctaactccttgtagctcttggaacaggataagcctgttagagatggagagtggacgactccggaaatcgagttgatcaacgagaaggtttgtccaattctaatactcccgagatcagtgacaatgctgacaatatcaagttacgtcttatcactaccaagccggtaatctacctcatcaacctgacaatgaaggactacatccgccagaagtgcaagtacctgcccaagatcgcggagtgggtcaaggcccacggcggccaaggcagtgatatcatccccttctccgtcgagtttgaggagaagctgtggtccctaaaggatgacaagccagcgctagacgccttcatggccgatattaaggttcagagccgcttgggcaagatcactaccgagggtatgtccccagtatttgcctcacatattcaatactaacagtcatggcaggcttcactaagctcggactgcaatactactttaccgccggcgagaaagagatccgctgctggccgatcaagcagggaacactcgctccacaagcagctggtgttatccacggcgactttgagcgcggtttcatcaaggccgaagtcgtggcgtaccaagacttccatgacctctgcaacggcgagaagtcgatgggaccaatcaaggctgctggaaagtacagacaggagggcaagacttacgtcgtcaaagatggcgatattgtacatttccagttcaatgttgcaccgccgaagaagaagtagagactgttcggaaatgtcatttgcctattattatcgctggaaatatggtctttactgttcctattgagctgttttatcgggcaaggtcttgatcctactacttggctttaaattgcatttagatagataccatggattcgaaagttaaaatggcttcaattttccagcatgttagaccctataggattagcaagtacgccgaattcggctttattggagaaattatatattctgtatacggcggatctgtgaattactgtatgtggttagttttgcctcattggtgccgtcacgtaactgcaaatgttagtacccactgtacaaaacccaatgcgaagatccattagtctatattagggctagaaatggatcatcgagatccctgtatcagtatcaatacagtgacttactataattaaaatacgttgccctgtcttgtggctgaactggcgatatactgctcccggatacctacaaagaagcagagagccgaggattatgtcaaattcatggttatatggaagaccgatgtgtgggatgtctgcccagggactttctgttttccccaccatcacatcacctcactggatgcccgacatatcatcagccttcatcttctcacattctttctcccactccccatacgtccgaaacaagtactcctgcttgtccggatggttacggtagtatgtttcatgattgatctcacagacaccgtcctccttcccctcgtggtcgatgcagaaggcccgattacatagaagacatagctgggttgggaggttgtctttcaggtgtggttttctcaatcgcatcctgtcatggacgtggcaggatccagcactataggtttggttctgaggagtttgtcagcctactgaattaaaatagaggttggtgcgaggtggagaaacggaccattctgtaatgttcgatggaggttgtgttgataggttttaaaggcaggatctcgaaggagcgagcaatggaagatagaaataagggtctcaaattgggtactgttgcattgcatgacctcgtaataactagacgtgggctgcagatcttggcattgtactaattcctaaggaaatcattcttcctgatggaaagaaaatgtctcatttgttactgtcaggcggtttcctgaaacgaacgaagtgcgagaaagggttctagcatggctggagtaatgcctcgtggtccgcaacctgaaattaggcggtgctttgacgctgccaatcattcgtttatcggtacgagtctttaagggtaacagagaatacgttatttgtgatcgtaatcgcgaatggatccggggatatttgcaagggagtggattaggagtcgatatgatgctggatgaccaggaccaagaatttcccatccttgagctctaacaaaatccatcttgagttgaacgagaatagcaaccggatttcaatttgacagtgttatatactatagcattacgatagctttccaatgaagacatgttcattttatcgacacgacagccaagactaaaggcagtggcttaccaatgatactctatatcacgagacagcgaaggcccggtgatgggtgagggcgagattctatcaagcgtaggttaatatttgccatctcagagccgacggaggaggcaggtgtttcagtgcattgacgattgctgattttcaaagactcttctcttgatgaaatatcgctgcaattcaatagtacagaaaagctgcgtccatcgaaatggcttggggtgtcaagtccccagaaattttccataaatagcccgggtggtctagtggtatgattcgcgcttagggttcacccaaagcattaatgcgcgaggtccccggttcaatcccgggctcgggcccattcttttttttcctcttctttcttactagttcattgcaacttttgttattatcaccagcagtcttgaatagccaaccctagcaacaagacaaattatcatgccaattaccggggaagtgctcgaggccaccgttctcggtcacgcgatcaacaacgtgtccgaacagacaccacgcgcggttttcaaatccatctgcgcgaaaaaacgacgaagcccgcgtagaagccgagagtcgactggtggcgatagtctccgatactgaagagagccctggcaacaataagagaccggtaccacgctacgcgtcttgtgtcaattgtaagaaggaattcgatgtcacaactaatacggaggaaaactgtccaagtgcgactgcccagaatggagattgaatttccagtatgctcaaagaaattaggctggcactttgtgtattcggcttgttttcagctgcatatatcactccttttgtgttggatatcagacatgtatcattccactgaactgaacatgacttgctttgagacaaaagtctcatgatgaacagtttccaattgtaatgtctagtcaatgcaccttccttgcaagtgttcaatgtaaacaatgtaaacattacggattgggaaggtgccatgtgacattgacattgacattgacagggaaggagcgagggacctgtcgcacttgaggaaggcacgtgggttggggtataaaaggccccccccccccaactcttttctcttcttcttctcttcttcctctccccatctctttgaccaccatctctccgtagcctccacgagacagcgtcgacagagggtcccgtagcacctgctgcccaacctaccacagggacatcaacattaccatgttgtggaagtccatgtaggtcagcatcaaatatcaaactgggctttctcgtggatgttcctgaagttgtggctctcatggccacttgatgagtcccacggaatacatgaggggtggggacggcggtagccgaagactcgtaacttcatattgtgtggacattgcaccaacgacataggaaaaaccagacgatcttgtcatgtaccaactagaattagtggtcaatcttcagaaacctacttttgaagagtcctccccaacggccacccgtacagccgcagtgatgcatacgtcagtgtgactaccgcacgggttgctgcatacatataaacgatacctggaggactgccagctaattgctcctctccctcttttttcttactttccccagtcagcaattgcactctcttctctcagcctctcgatactgccccccccccttttcacacccaccatgtgcgacgaaatgtatactcgtcaatatcttgccaagatgatgggcaaagagatcactacacactgcccggactcttcgaatgaaaaataagctactctctatcccactcgcaaatggcttatcatggaaaagctaagtgagcaaccaaccccggttacccaagaggatttcgccattggtatgggcccggcatataccacaggaaaatatctttgtcggcttgccgagaatgaggatacgctcaccttgatgcatatctacaaacagattcctctaattgacactgaacctgaagactcgacagttcggaaggaacaggcctgcgggccacgcaaacacgtcgagctgggtgccatgaagcgttttacagagaacggctgcactgctacccccagtcttcttgtgtaccaaatcggcaagcaggatgaagtggaccttgtctctggtgggtatatcacataccttgtatgggaaaaagtcccaggagatcctcttgatattgagcagttctggatgtatccgtacaaaaaacgacagaaaattcggaagagtttccagaaggcctatagatttgttatccgagcttgattatcatatacttatagctaactagaattcgcgaagctctaagcttcaagtacgagccaatcttccagaccccgacaaagatcatagtcgacgaatcagataatgtgtatgttctactccatcccttacaatcccaagctcatagcaggtagcaaaatctgcggtttcagccgggctttcccagtccccaatggatggagagacgaccagtacgtgatgttttccctggtcctggcctcccccgatgacgctgagtatcttcccgcctcggcggatgacctcaaatctgggccaaatggctggaagtggtgaggagcagccagacaagtgtccaggccaaatggacggaagggtcttgaaccaattctctagatagtcaaacagtctacaaattgagtgcatggtgcttgcttaatttattcgtgagattatctgcttattcgagtctgtacaaagcatggctgggtgggtccaaccagcaagcagaattggtggcccgtggccctatgtaaaaaaaagaaagagataaatgccaggtagatcaacgccggtggaagatgcaaaggggggctgggctctaaacaaccgcgtatgctccgaccatgtttccatgtttcatgaaatgacccccacgaaaaaaaaaagctgggccatcgagttctcaaagacaaatcgggatattttgcgcgccggggaaatgaaattgcaaaagcagagagcaaggggttttacactgcaagtggaacgatggtggtccccagagagaaacgagttatcacgggctcaacggtaaccacctggggatatatgagtgataatgtcattatgagagagacagataatagacttaccggagtagggattttggcctccaccgtgcgcagcttgcggtatctgtatttgtgaaatgtcggaaggaatatcaacgtggcgaagaaggtctatcattttctcgggagaaaggcgggtaatattgtatgttgccgcagaaggcaggatgcttaagagattcaccacttcacgaggaagaggagctggagacccttggggtctgtacgaggtgctctggccgttcaactgttgtactcgtttcggctggtcgaggcgccgagcttgcgcgctcttcattggtgactcagcgcgaacaaactttcgtggacgacctgagtcttcatcatattcatcagtaggatatggtctcttaggcgaattgagagaggtatccatgtatctggccatgggagaaccgtgatattccgcggagattcctgccatattggtcttttgccttgtctgggatggggacaaaatgagttgcaccgacgtagggtcaaagttggagttagagtagcgattggcgaattgttccaggacaggatcctccgggtatagttcgcgcatgcggttctccaagttgataacttgggtgaggtcaccgtagcgagattcatactcgtggaggaaggaaaagatgggcttagccttgtacacattctccgggttggatgtcaattttctgacggttgtttcgaacacggctctggcatcttttgcagtggttagtaggtcttctataaacacgggatgtcaacttactgatggtatcattaatgtcgagcagatgccttaagtattcgagcgcaaagtgctcatcctccgggaataattttgcacccctctcgaagatcttggtggctgcagggtctttgtagcaatggtactccatcagagcactcgcgatgtaaacatcgcttgtaatccgacctcgtttccgggcttcggcaaaaatttggcgagagccagccagttcccccggttttcccttaccttgaattcgacgcatcgaacgcatgagtgaaatccatgcaaaggagacagtcttggagataatgttgatctgaacggaatgggccttccggaccgcatcaatctgtgccgtcttggcggcttctctttctttagcttcaggatcatcatcatcctcattttgaggttggctttccacattttgtggagcaaaatatgcctcgatgcgtgcgacgtcctgggtttcctggttgcgagccttattgatcaactcgtaaagagcatcaagcaatttgtcgtacggttcccggaccttggcagcacgcttggcggaatcctgttccgaatccgaggtaacctccaatcgatccgcgcgtttgaatgtcagcaaacaactctctgggtttgcatcaatgccattcttcaagaactccgtgcctgcgtcctccatgtcgttcaagaagcagaactcagctgcatcaaaccacatctcgggcaagaaggccagtgccatgagtgcctgtttgtagaagtacactacgcgtgacttgtaagcagcagggtcttcttctttcagtaccagaggatcttctttttcccatgcgagccagcgcttccagatatctgcttgtgctgagaattcaacgtcgccttcagaccccggaaggggaggcagcggtggaagcgaagtgcgaatcaagtcacgagtgatgttttgcaattcggtgtatgagctacgcgcagtcatgtatgacggtgaatgttcttgaaggaatttgcgtccctgatagaaaaggtcaatataagccagttgaactcgagtactgtccagcttaccgtgagcttgtttagattcatctcgaattgatcatactccttccagagagtattgacagcttgggtcggcacgccaatggctcgttggtaggcctttcgcagtaggtccatcttttgttgatcctgccatccagatccaccaacgatgcctggcccagaacggatgaactcaatatagtctgcccatatgtttccggaatccttgtccatcccaacatattgaatggccatatcatatgccgatgaaatggtcttccttgcctcgccagaggcatctgttgtcaaaggattacgacgacgaatgtaatcaaggtagacagaccaaagctgaacgctgggggttgtcaggagcgttcggttaaagatctgctctaagcggaagaattcattgagctcagactccatgctggcataagccacccattggtcggcctgtgatgtatcccattagcaatcttgtatcttgccgagggtgaaaatgaaagaacaaagaaagggagcaaaggtaggcttaccgccatggggaacaacttcaagaaccgctcataggtgtcacgtgcgctgtctagtctgctgcggcttctgtgctcggcaattaactccaaccaagcagggatatcacctcggggatcctctcgaatccggtcttccagcatgccgacacgatcatgggccagacgaccctttgaggctggagagtcaggtacagaagtaggaacagtactgttctgcatggttgcggattgcaggtcttgcgcagcccagtgcgattggccaggaacagaagagggatcaatattatgaacaggatcaggagaataagaactattggcaacatctggtccactggcaggtgcctgctcagcatggtgtgatgatacatcaggggaagtgttttgcattgcatttcctgaactgggatcttcagacatggtcacaggcatagcattgacatcttcacccccaagtacagccggcggctcatactccgcgtcaccctcatcatcctcgtcatcatcaacctcaaatccgccaattattcgggtcttggactgtggctcagcagtagatgctggcacgggggtcgacgactcaacacgtgaggggttctgagaagggtcgggggagtcactagtctggccagcgtctgcgtctacttctgaggcgacatctgcgtctggggcgacggtcgggttgggaatgggatcttcgggctcatctgagggagccgcatcagtggggccggcaccaggctgcttggactcgggaagggagacggagtagtgatcccccaatgccagtgaggggtcgtagtcatctgattctgcgtctgagttatcaccttcctgctccttagtgggggattgggaatcgggattcaaggcttgagcctggaagaaggcagcttcagcttcatcgtccgccatgatgggatagatgattaatgcgataagagcgaggtcgaagcaaagtaagcaaccgcgaaagtcacggcgcaggccgaagcagggtttgcgcggtgtggtatcaggaggaattaaagtaaagaccaatgctccgaaggtcaagggttaaggtggatcacagccactgttgacgagataaccctcagccgcaatgtgaagcaaataatagccaagagtgagagggtgcaaagctgcgatgggctgtgatgcaagttgcccggggattgaaattagggtcacgtgcgggcggtgaggacaatgcgagggacgcgaaaggcgcgtcgatcgatgggctcctcgcattgagctagaggggttgagagcaaactgcattcttgtggacctgttgttttctcttattttctctatcttcttcttctttccacccccctgttcatacaatcttctactcttgcctctactctttaatcccacgtacatacactcatatcttatcacaatgtccgtcgtctcactccttggagtgaaaaacctcaacaacccggctcctttcaccgcctcgtaccaattcgaaattaccttcgagtgccttgagcagctccagaagggtgagcattggcttattctcccatctcctcagaccactcttctaacattctttcagatttggaatggaaactcacctacgtcggatccgccacttcgtacgtccaccctccctccctcctaccaatgccacaaagtctaactatcacagcgccgagtatgaccaagaactcgactccctcctcgttggacccatccctgtcggagtgaacaagttcatctttgaggccgatgcacctgatgtcaagcgcattcctacttccgagatgctcggagtcactgtcatcctgctcacctgcagctacgacggccgagagtttgtccgggttggctactatgtgaacaacgagtacgacagcgaggagctggcagctgagcctcctgcgaaacccgttattgagcgcattcgtcgcaatgtcctcgctgaaaagccccgtgtgacccgcttcgccattaaatggtgagaaccccttgttttgtttatttacatacctagtgcggcttttactaacatttttttttcttagggattccgatgactctgcccctgctgagtacccgcctgaccagcccgaggccgatggtctcgacgatgacagtggagcttacggtgccgaggagcgtgagctcgaggctgcgctcctcaaggagctcgaggactcaaacaagcccgccgaaggcgaagatcatgagatggaaggcgccgaggcccccgctggcaaagaggacgatgaagaagagatctccgatgccgagagtgaagatcttgaggcggagagtgacgacgatgaggatgagctcgatgaggaagagggtggtgatgctgatgaggatgtcgagatgggcgacgacgcagaacacaaggacgatgctgccaagccaactcaccagcctcagcccgagctcatggtacactagatcatggtgtgctaccggctcgcaggagtggtttctttgcttttaaactcttccttttttttgaatgttatttaacgacagccagaacgcaacgtttacgaccctcggactaattttccatgttattatcctgatttgcattggctatcggtctatgaaatagaattggtataatttaatcccactggcattcagtcagccgttcgtattcatttctctaaatatgccgtaataggcacactaccgggccatatttgtatcacataagaccgactcccagatgcctaactagctatattgtacggagtagtagagggtagattaatgtcaaaaagcgttatactcttgagtttgccacccgagacgaataaacacctacaattgtgagatcaaggtggatcagcttgaagcggggagtcaaaaagtggatgaatgagattgcaaagtgatctgtcaaataacataggcacgatgaccccgctagttaacatgacgccggaaaaaaaaagccaaagacgccgacaatggacagttaagccatttcaaaaacccggtactatttagtaagagatctcgcctaaaagccgaacttggaaccaattgctgttgtcaaagaacggtcagcgacagttatgcaagggggttaagcgtcaaaccctatacatgggtctgtggactttgaaggaagattgacttaccgcccaatatagccttcttcttttgtgactgtacgtatttgccaacatcgttaacaaagccgctgctgttttcctctagcctgtccatgctatctccgacaatcccgagacgctctgtgcgttcttggacttgacgtgacatgtaagaccagtagccttcctgtccctgtacaggtgccgttggaatccgtccttcttttagagctctccgacgttcttgttcttcgaatttcatttgttcgaccatctcctttgatggtggccggtctgggccgccaactaaatttcatattagattctatttagagcggcatgtgcgggagtgacgtacttaaaatgtccatatcagccggcgagatatattgtgtaccggagatccattgcacgttcgtgatggtaggacgcgggggaaccacagctgctgggttgtaaagcttgtcgtttgaaggatgtctgtatgagtagggttagcattagcactatgtctcggcagattaatgagggacacatacagtacgtttccgcctccccagacattgaacagtccaacttctgatgggccgacccatgtcatgacgtttccagtaggggtgatgcaagcttctgagagacgtcggatgtccgcaatatggccaatcttggtgcaaccaatatctcgaagagcggggatcgagaatgctcgcgcgttgccgtcaccaaagagaccaaccaagctgtagccccgtccttcagtcttgacaacagctgctgaatcgcaaagacagtcatcccatgccttgtgagcaccctttgatgttgggggcttgaagattcgacagccagaggcagtcaccgcaatgacaacaccattaattttcgcgccagttctcaagcctccaactgcacttggtgtggccaaagcagagccaccagaatcagcatcgatggggatgacactgattaccctgtcttcaacggccgatgatccagcaaaagcagcttcgtaggtgccattggacccagggaggatcttgaatgttgcgactttgcccttgttcgtgccgacaaagcagcatatgcttgagtagtctagcgcatagttagtacattgatctgattcgagcccgaatcatgcataactaccttcgccgtccaaagtcatcacaccaaattcaatcttagtgggccattcaggttggacttcgtccgaggcacggttcttgaggaacccgctccgcttctgtcccttgaggaggtctgacatatgtgcagtgtgtataatggcgggcccgcgtaggtcaataatcaccaaagtaccgcttttgtaaccgaccgctacaaatcccacctgcccatgcttcaacgccgtcactggaccttgttgcatatccaaaagagtcagaggtatcattcccgtcttgagcccaggatctgttcgcttagttatcgaggtcaactgccctggcggttgattgacaccgggggactcctcagtcccgtatgaggggttattgccccatcggaagacggcaagctctccggtcttgagtccaatagacatctcgcctgagccgctggcgagagacatttcaatcacttcgatattgttgactcggcctatggcacgggcaagatcaatttgaacgacgtcgctgttctcaatttcatcaccgtgcccacagtcccagacacggacggttccatctgcgtgtgcggtcgaaatgatattccggctctcaaatcgcttgaaagtgttctttgcttctacgccgcccatcacaaatctgggtccctgcatccggcgctctctcagaccaagccacaccgaccgatcaactggagtaagcacagctttgtttacaaagggatggacgaaggtgaggaacggatgaagcatgttagtgggagtaattgcgtgtccgctggggaaactcaaggaaataatttcacccgaggatagcatagcgataagtgcgattggatcatgggcgccattgaaatagggcgaggatcgggggatgaggcaaaagtcaacaaccttagctcccggtgggattgatagatttatttgtcgccgtggccgctcgaggtaagtagacagtatctgccaggaggacgtctgatagttgggggttgtccccatgtccaggaaaacgagtcccttgctctgatcacctactggtcgaccaccagccaccaaaagaccagtgtcttccgggttatctttggtgcaccaaatagcctttgtgatcggctccttgggtccagcaccctctccaggtgagcccggtctgccagcagcaccggggtggtcgacattgggtacctggacagtccgggcatgaagcctacggccatcctttgtatcccatagcactagacttgaatcatcatgaacggtcaaaatgaagatcccgttgggatgccagatcgcttttgtcaatttaggtctgcgcacgtcgtgggccggtagggagtctccacctggtgccccaggagggatttcgtagacaaagtacttttgagcaatattttgcttgaacgaaaatgtcactgctccctctggatatcccactaggatcttgccaatgtctcgcggggagaactccagagatacgacgggaaagaaccgcgcgcgagggtttctttccaaccacaagttcggaactttgaacggcgtcaaggactcccgatcgagatcgtacgcaataatctcacctatccacaagtcaatctccagtccttttcttcccctaggaatttacataccattctgcatgccgataaaggcataatccaagcacgggtccgttagcaaggcagttacctggcccggtggcgtataggaaaccaccatgcgtccagtcaccaaggagaatatgcagatttcgttcttggagtcgatgctgaccagtttgtcgccgcaaaactgaaggaaccgcgcggacgcttttcgcgggaactcaaagaccaccgaaacccggcgttgcccaaagacatagatctgcccgctaccgaactgggtatcaccggtaccgaccgcgatgagggattgtatgggatcgtatgcgatagtactaatctgcgaattcacaccgcatcgtgcgaactgagaacagcggtgtcagttggggaaaagagaatgctagggatgccaagaacttacatcgtccaggaggaacaagtccggggacaagccctcggacaggtccttctgtataccagcttgctttcctcgcaggaactgagccatctgcgataggggtatagcaagttatggaggagtagaagaggtcaagtgcggagaagaacaccattgacgccatgcaaaagctaaacaacggatctgccccgctccgccctatcgccctatcaattccgacttggcattcaaggcaacgtgattcttttcttggtcttcttgttctatatataggttgggatgaaggtcgtatgtattttatttcaattggaacccctggaaattcgtggataaaaacgctatataacaatgcaaaaagaacaaaactccaaatcacatgcatgtatagggccagccccgtcgctggaaggaacctcgctatgcaacagaaccagtataatcgagatcgttttaggtatcaccctggacatataaagcgccagacaaatcagtttgccccgttatgccagttcaagtctcgtcatttccgcaatcgtggttgtcaatcgtctccgcgcatcaaattcgctcgtctcatctcgggttcgatagtattgcacagtgatttgggacaccagccggtagcacgcatatctaggaaaagaaagagttagcagaattacactaaattgtaatggtattccaaacacatacaaagccagccggatgttttcctccattgtcctggacgccgccatccctgctccctcaaagaccgccggggatgcatccgcgaatacctctgccatcaaaacatcaccccacatggcactgctgaagtccacgataccagacagctgtccggactcttcgtctaccaaaacgtgggagggtcgaccaaagtccacgaccacaagacgtggcagcgatacatcttcaagagcaggcgctaaacgactcagctcctgccggatctccgagtaaggaaggtggatgaacatgtcctcggcgtcacggagaacaccttcaaccagggaacagaaggcctctcgccaggagggtcttccagcgccaaatgccacttgctgcaaagacccaaacccaggggctgcgtgttgaccgatggtactcaccaagaatcccaagtgccggtcgatatcatccagttgctgggaggtgagctcgccttccatctctgatagactcttccctttcatatattgccggaccaagtaggcagacccccagactcttctgtggggatcataatgatagagctgcggtatacaagggtttgcagactgccctagaagagaaaggaactgggcttcggtctcgaggaacgatcgctcacgccgaagcagagcggtccgtgatgatggggatccctttagcaacaaatgagccccatttgacagcatcagaagccgcaatgggtgcatgtgaccgaaaattggatgtgagtgctgcacacggactgtagaaggaaacagcagcgagaggacatcttctagtctattgtgttcgtctacctcggcggcatgagactgccaacgaaaggaatcgctatggccgtgtgttcccttgaatgatggcatcgcagaacatgtcttcaagtcaagttgcatcataacctgtttggtgggggatgttggcgaatagagaggatgctatataagccaggctatgccgacccatgaatcttggaaaagatattcgggggatgatgtacgaaagggctactcatagaccttgagagccaagaggtcagatatatgccgaggggatagtttgaactgaaaagcatcttcccagcagatgtggcgcaaattcgcttctgggatagagaattcgcgaaggaacccatagtacggagtactctatagtgatccttcgaatatcaatggagcacagcagaccgccatgattgtctacttcatacgtgacccgcaataggaacagtgacagcttattttcggcgacgtgcctcttctaggttcatccacgcgagatacgaaagagaagacatcgctatccgaggttggacatagattgcggagtcgaattcgaagaatctgtttcgctgagaaagcattcacaagcgagagtccaaagacctgttgtcacattggttcataattaataggaaatatgggacaagtaaattaagtgaagccgtctcgcctaacgatcccgctctaagaaaggtgatcatccgagcactttaccccttgaccaatcacaacggttccttgccgaaatcttccagtggagttcagaaattatagaacttttcaagggttctaattgttctagttgttcttctcggttactttccgaactgatttcgcttactattcgaaactagtctatttccgttttagccatcgcttctaatggctggaaccgtctgaaacactcgatgcaagccaccggaggttttactctaaaatgaaatgacttgcatctcaaacagtttttggagtcatgatggacacttggatccgcatacatatagcttctgtcttctgtttcattcttttcgacccttttttggactatggggcttgtcggtacccgtcacgacttatcaccgtatgaattcagtcgctagtgttgagccctctggtatagtatcttagctacaggaagtgtgatactactagttgcaaagatcggggttcaacgtcaagtatgtttagtgtacttttagtgtcgatggtcaaatacatatccgcctcttgtttggccgaggctaaatatatcattctaacgaggctaaaaatataacagaagggttttctctagctttcttggctgtttcatctgtcagctataattcaagagcctctatcatggtactcaattcctccaacgtcgactactcgatactggacgcatgcaaacctcgtcaatagtgtatattatttatgcggagatttgcataaatcatgcaccggaaacaaaccccaatatggaaggtgtctatggtttctgtttcaaattcactcgtcttgctacacacgaagtcgcccgaaaagattccgagttactgttcgacgtcacctgcctatgaaggtatatagatgagtcggtttacttcaaaggactagttatgaatgtatgagaacagcggtggagatgatataagtgtagcatcggtggtagtagttattattgaactacctaccgcggtaagtaatgtgtcattgatgctaagccttagactcagtggccggctctgcttttggtgaaggatcgtagatttcggccaagttgaaccgctttagcttatcataatcacctggcactacactcattccaatcacattctgcgacaagtcagttgaagatttagtagagggttcgttttgtagcactcacttgggcaacatcaacgaggatcattagatcataattcttcagattcaccggatgctcaggcccgacagcatcggcaacagtcttgataataacgtctcgattgagcttcgagttgccccgcacagtaggccgaatggcatactaaataggtgacagatcagcaatgctcaaagtacatttcccctcacagcaagatcatttcctagattagtagaatctccgactgcgaggtagggatgccttcaactcaccgtctttggtggcccacccgaatggaaatgaggcttgagaatctctttcgaaaaagccgccaagtccacactcagggtcttccggattgatgtgactggatgcatgcgcttgatccatcggcttttcttagtctccggatgggcatgtgcttcgctacacagacggtgcacaagctgtaccgggtctattgagggatccagacgcatgaatgtaactgacagggattagcacctatgaacgttccgagggccgagcgcataaacgaaatggcgtttctcggacgatcgcagacttaccacacggcatgtccatctgcacgggctggaattgacgagtattgtttttgctgggctgtaggccctccagttcccttcggatctgggcctcgatatcttcatcatccgtatcgtgatcctcttccttttgattttcagtgccctcgatggcctaggcgaagagttagcgaaaaatagaagaatgatcccaagcggaaaaaaaaaaaaaaaagatctcacctgagtaaaaatatctactgcctcagacaggcattttccctctctgcccatatcgcatgtcacaaagacacctacatcgccagattcaatcgcgacgcgactggcctgtttcccatattttccaccaccctaatcccattagtcagtgctccatcacaagatttgttcgaaaccaacctttctcttctttgaagagtgacttgatctatcaggcatagctcttttccccatttagcaatctaagctttgatatgccaggatgttggaatgtggcccaggtggggggtcggagtttgtgtgatcggccgagagctgcgttcggtttagccccgagatcgacctttttcatgatatgcttattcctccgtacatcggatttgcgacctgtgtacactattctatggcatgattatgtaggtctagatacataataaaggcttatttgttctgctacgtggcctagcctacaaattgactctaaaaataacacaatgtctatcaaagtacgaaatgatggcatgacatcaagaccatgacgtagtccatgtggtctcacctttctcacaaaagttcccctccccctctatcccacctcacctgttcctacttctctttccattctaccatatccctccaatcatatcaatcatcatggtgtctaccgatattgctaccagggaactaaataatcccgtggatgttgccgaatacttattccgacgtcttcacgaggtcggaatccgctcattgcatggtctacccggtgattacaatcttgtagcattggattacctgcctaagtgtggtctcaattgggttggaaactgtaacgagcttaatgccggtaagacagacttgacgacgaatgaacaatccccatctaacatcacctcctcttaggttatgccgccgatggttatgctcgtgttaatggcatcagtgctattgtcaccacattcggtgttggagagctgtccgccctcaatgccatcgcaggagcctactccgaattcgtcccagtcatccatatcgttggtcagcccaccactcagtctcaaagggacggaatgttgttgcaccacactcttggaaacggtgacttcaatgtatttaccaagatgagcgagggaatctcgtgctacgtcgcacgcctgaatgaacccaaggacgcagccactctgatcgacagtgctattcgtgaatgctggatccgcagccgtcccgtgtacatcactctgccaactgatatggttgctgctaaggtcgatggcgaccgcctcaagacgccgattgatctttcattgcccacgaatgacccggagaaggaggattacgtggtcgatgttgtcctgaagtatctcgaggccgcaaagaaccctgtcattttggttgacgcctgtgccattcgtcaccgcgcactagatgaagtgcacgatttggtggagaagtctggattgccaacctttgtgactccgatgggcaagggagctgtgaacgagacccacaagaacttcggtggtgtttatgctggcaatgggtctaacgctggagtcagcgaggccgttgaatcctccgatctcattctgagcattggaggaatcaagtccgatttcaacaccaccggtttcacttaccgtgttggacagctaaacagcattgacttccatagtacctttgtgagagtgcggtactcggagtatcctaatatcaacatgaaaggtgtcttgaggaaggtcgttgagcggatgagtactctcacccatgctcctattcccccggcttcgaaccgactacccgaaagcgagaaaaactctaccgatcaaaccatcacccacaagtggctctggcccatcgtcggacagtggctcagggaaaatgacatcatccttacggagactggcactgccaacttcggtatttgggacacccgcttccccgcgaatgtgactgccatcagccaagttctctggggcagcattggctatgccatgggagcttgtcaaggcgctgccctcgctgctaaggagttgggagatcgtcgaaccattctcttcattggcgacggaagtatccaactgactgtacaggaactaagcaccatcctgaagaagaagttgaaccctattgtgtaagcattcccagcagcccggaatgcccatatcatatactaaccatctccagtttcgttatctgcaacgacggctacactattgagcgatacatccatggatgggacgcaggttacaacgacatccagccatgggactttgccaacattcccaaggtcttcggaggagacaaggacaactacgcaggctatcgtatcaagacccgtgacgaactcaacgagctgttcaccaaggaggaattcaacgtttccgacaagcttcgagtgagttatcaatacaaagaagtcccaaactgtttgctaacacggtatatagctggtcgagctgtacatgcctcgtgatgatgcccctgcggccttgaaattgaccgccgaggctgctgcgcagcgcaacaaataagcggttcgaatcacgagaaagtattatgactcttgtcgtaacgttacgatgcatatgaaaagcaacatgatagcaatacctgaactctgaattgtttaggcctcggtgctttctttccattctcacggctttcaaagggggtggccgcatagcggcgggatttaataacggtcgttgagtatgtagcatgcacatcttcgctcttcactcatgaaatacaatgaaatcttcatatcttaagttagaagtctaccattatcaaaatctgggtagatatatcaagacatgatactaagtagatgagaaaatgcaagcaacgccgacccagcgtccgaggctagtacgaggctagtacgaggctagcgtcgctacaatgtcaaaataagcatctcgcgttcaaagttaaagttaccaagccaaatgctttgaagttttctctggcagattctgctcaatttaaaccaatgtcaacctataattcatttctaaagctgcatacactcctgcttatgggaggtaggaggtggcatctttcttttaatgtggaatgtcccggtgggaccacttgtcttcgattaggtgagagatgtctaggaagttctcagggataaatttacgatatcagatgcgagtccttttgtcattcgttgagctccgatgatatttgcctccgctaggatttgggataccggtgagagaaaggaaaagaactgcccaatatcaatttcctagaagagcctcaccctaggaaactctaccaatctgatttaactaaagtaaggttcaccatccacgtggaacaataaaaagcggaaataggctaagcccgaagggaaactcctgtccgaaccactaccggaaacagcaataagtcatatgagtccatatgagtccgaagtacggagtagcgaagaagagacatgtcgaatgagcactgaccgtgcccaggtggacacttttacgctaaggcaaagctgtgaatcatctcgactgctaaagctaagctacagtgtgactatgttgtgtatagatccgaatttgccgagtccagactgacagcaaaaaacgaaaaaaaaaatctcttctcttccaagacctgaaaataaacaaaattcccgatggtcgccgagaaacttggaaggaacaaaggaaccttggaacgaacctaggaaccttccaaagttggaaaggcccgagagcggtccaaacacgcgggatttgatttttaggattgatctgataatcttcatctgataagatggaaggcgaaagtgtgcctggtaaccttatatccaggaacgatcttcctgttcatcgctcctcgttgatatatactcgatctgcaagtctacaaatttttcatgaaaaggtcatctctgtgtcccatgacagcctgctgatctcgggtggagctccgaaagcatctgattacctgcctctctccacttggcgcaaaataagcccttagcggccaaaatgcttgcattctaattgggagtctgacgggctggattaatctatcatgctttcggggtctatgaggggacctgacttttatttgaatatggcaggttcccctatgcttattgatacccttggatattccaagccatatctatatgtactctacttctaatgttgtagatagaattttacatttgagtacatatgctaggtatgcataagacaaaaagcctgggacgataatagaatgcaaaaaaaaggaaggggaaaaaaaaaacaatcggcctgccgcgactgccggcaaactagagagttagccaaactaaccgaaactggagacactcggatttggccgatgagtctgtaaaccaatcattgcacagtattttatcggcatcattcagccgtgagaagcattggtgaatcccacacacttccaggttgagtggcgtgtcggctggtccgttgttagagtcttaattccatggcttggggtatctgatccgtttatctccgggactttggtggactaaccggtcctggctattccgtgcaccttgtaaggttcatggttagcttccaaaaggattcaactcactaaaaaactctttagatgctccatcccccatatatagctggactccccgagtgtacctcttctttccttttctttctcatattctcaatctttttttcggagctccctatactgtagtcatgggtgtcttcgatctgattcgtggtcggaaggaccaggtggtcgtcgaggatctgcgcccaactcaaggaaatgagaagcccgatatcaatgtggagcaaaacacggtggacgatcatctgaacaacctgggccgtgcagagaaggagatcgaggaacatcctgaccaggtcaccgcgaatactgcagatggtgtgcgcaaggctgaggctgttgctttggtctggagcaagccggctgtttacgcgacatatgcctggtaagtactatggatgagaacggcatatgaactagaatctcacatctacaggatctggatctgtttctttatgttggctttgcattcctctatcggttccaacgttctctactatgcctactccaacttccaggatgcttctcaggtcagcacggccaccattctggcaagtatcgtcggtggagttctcaagcttcccatcggaaagatcttgactctatggggacgtgcagaaggtctcatcatcttcacaaccgtgtatattctcggcattatcatccttgctgcttgtaacaacgccaacagttacgctgccggttacgttctgtactgggttggatatgatgcgatctacataatcctggacatctttattgccgatacttcgggcatgcgcaaccgtgctttcgcctttgcatttgcctccacaccattcatttgcacttcattcacgggtccactggctgctgcgaatttcctgaagacttcaaactggcgatgggcctatggtgcctttgctattatcatgccctttgtcttcctgcctctggccggtgtcttcaagtattatgaaatcaaggcccggaagatgggtgttttgcagcgcccagttagcggcaggactactatgcaatctatcattcactacttgcacgagttcgacagtgcgtatatatcttcccttctgtcctccacctatcactgaccaaatttttagttgtcggtgccttccttctaatggcggctttcatcttgttcctccttcccttcagcttggccaactatggccgtgcccagtacgccgaagccagctttatcgcgcccctggttattggcttctgcctcttctttgtctttgcggcctgggaaaaatggatcgcccgcacccacttcatcccctaccagctcttcaaagaccgcaccgtcctcggcgcctgctgtctctccgctatcctctatttcagcttctactcctgggatctatactactactactttgtgatggtcgtatacaacctcgatgtcacgatgaccggatacatgacagcgatttacaccgtgggatcctgcttctggtccccgatcttcggcatctggatccgctacgttaaggagttcaagtacagctgcctcttctttgctctaccattgatgatcctcggcgccggcttgatgatccacttccgcggctcggacggcgatattgggtacgtgatcatgtgccagatcttcattgccttctctggaggtatgttggtcatcggcgagcagatggccgtcatgtgcgcgtctgaccgtgagggcatccccatgatgatctcgctggtttccttgttctcgaacttgggcggtgccattggctatgccgtctccgctgccatctacgccaataccttcccccagggactgcgcgatgccttgcctgagagtgccaaggatcagtgggctaccatctattccggtggctatgttactcaaatgcagtatctacccggcactccggagcgtgacgcgatcaacttcgcctacggatacagtcagaagtatggctgcatttctgcgacggcgattcttgcgcttgctatcccctgtattggtatgtggagacattacagggtggacaaggagcagaacaagggcactgttctctagatctggagatgaatgaggacacatgatgtgtccaaatggtggatgtttatgacttttcaaaaataattcttacatgtatcctgttaacttactagcgagatacaatgtaattttcctcgtttagactgtttttccactgatagttcgctaatacttctagtagaagtcctccgaaggcgactactttcatgccagtattccggaccatggtggctaaggcatatgctaagttttggatttatttccacccaatgcttttagagcagaccgaaaatgaagatgcagacgccacagcactgtcattggcgcgtagcagataccaggtgatcacgggccaccgaaggtgagattgggagattgcagggccagacggggtctgggggatatcccatgaagaaagtgctaaaagtacgatactagttatactgttccttctttctcaccgtgtactgtgtcctatgtacatatgtgctactactataaccctaaaaggacaggaagagggagtttaccatatccaaggaccacgtgacgatccccctcgagacatcacaatcaatataatcaaaggccatttgatattatcacttcaagcattcttggtgagttccattcgcttccgaaatacgatcggaagtaaggagttgtggtgttctgtgctcgcttccacttgcttgaattccattcgccttttaaccttccaatcttccaatctttcgacccaatcgcgtcgccatcacaaaaccgcaggtggctaaccatgtactgagttcgcaagagcttttctttatttcagtcaatcatctttagattgtcttggcctgggaccagcccgtcgcgcgatttcagtctgttctgcaatcccaagcgctgcgataacatcggcaacgacgccgaaccaaaccatgtcaactcacgcactgaggatctaaattcgttccatttctgcccgtccgaagcgaccaccgagatcgagtatccggccctcaaatccgaccgcttgtttggcgctgggacgtctagcatgatgcgttaatgatcctacctgaacaaccccgaaaaccaccttcgtccgaacctcccctggacgtcgcagtcgagacagcgggatataactgcaattaatagccagatccagtgcatcgggcatcacaatggatggacgtcaacagtatgtcccggggcccccgccttcctctcagacacaacaacatatgaacctgcctccccctccacctcgacatccacaagcccaaacgctggtgccaccacctcctcctggcccgccccctggcccgcctccaggagcgacctatggaactccgacaggatggcagcaaaactgggccagaccggcgctgaacccaggcttcccaccgccgccccctcttgcccccgcaccaaaccagcatctaacatacggtcgcccaccagcgcacttgtcgatcgttcctccgcgccatgaccatcagcctctgacatccgcaacttatatacccgggaacgatactattggcgtcggcattccggggttgttcgaccccaatggaagagctcatccgtacgcgcacaccaatgccgagagacaacggttgggtctcagccaaatgcaagatcacatcaatactccaaccccgtataaaccagatacaagtcttccgcagagccccggggcccgcaccgtttcttcgccgtacgctcttcataacaacattcatgaattaacgtccaacgacagtccgcagcaacaggcgacagctccaactaccgagcttactaaaacgacaagtcatcgttacaatgctagcggtacttcgctgggcggtttatctcacagcgaagcggcgatccagtggccattggatcgcgtgctcatctggcttgcgaaaaatggattttccaacgactggcaggaaacattcaaatctttggagcttgaaggggctgacttcctcgaacttggacatggatccggcggacgaggaaacctcgggaaaatgcatcaagtggtttatcctcaattgtccaaggaggttggccggagtggcaaaaaatgggaacctggccgggaacgagatgaagggaagcgtatgcgcaaactcatccgtcaaatacatgatggttcgcaagactacaccgtcactaccccactgaatcagacgcagccgccggcgactgcgttccctgagaacagtgcggcttacttttcttctaaattttccgagccacgttcggctggccctatccctggtgtcaatgatgtgagtcaggatcatctgagtgcattgcacgcctccaatcaagcccaaaagcagcctgggcaacgctcggttaccatgccggtctctgctggccacgattcgcctagaaaaaatgagtctccggcacgagaaaactgggcgcgatctgactattcgcggtcagagtatacccgcaatgccctatccggaataaacagcgaccatcgacgccagagttcgtccattggcagcgaatcgggcaattttcagggagcatctcttcggccacatgaagaaagtccaattagtggcagcccagccatgcagaatgtgtcacccgcttatgcaggagcattttcatcatccactggggatctgacgttgagaccgtatgatcactctcggggcaatagcaccgaatcgatcaatcggggcgctacaggccggtactacgattcacgtagacaaggccatgaacatgaatctcgcaggctaggccaagagggtactcgtccctcgcctcaagatgcctccagtcgacaatggaatgaccaaacctcgtcttcgtactccaaagaacacaagggctttttctctaatattctgaagaagaagacaagaactacggcttctagccacccgtcccccgatcatcagcatgaagactcgtcgcctacgacaagcccggagactcgcccgaatgaagcctatctcccttacataaagccttcttacaacactagcgacatgtcggtcggtgagcgtccatccacggcgataacaaggacaaagaaatggatatttgccaccacggatggcttgaactaccgtctgattgacatcaccgatctcgactctttcgagtcattgcgtaccgggatctgtgaaagcctctcgatcgacccgagcaatgcgcagatttaccttactcagcccgggcaaagcgagcatgatgatcctatgagtgacgcataccttgcacagtcgcgtcgaaacaagtcagatgcatacggttctctcaagctgtttgtacgagggactcctatgcttcctatgccaccccatactcctcgagttgatggcttgggagtttctttcatagaaaagtccaatatgtccccgacggcaacacaccaccaggtccaccggaagcccttggatgaagatgcccttaacaggttatcaccgcaccgcaccagaccagagtctccattgttgggctctcggcaaagcactctcaaggcttctacagggaagccatccccggcggagaccgtacaggacgcaagccaagctcttgggtctgacaaatccgatttactcgctcgccatgaggaacacctccgtgaggtcgaacgtaaacaaaaacaatatttacaatctaaaatgccgctgcaaaacaagaacgcctacagtgacaccgggtacaggcgaaacgaagtcattgactttgatagtcctcgtatatcgccttatgacgaaaagaagggagattcgcttgtaccacttcgtaaacctcccacagcgccaatcgagtccaacactcttaccaaggtcaattctctcagcaggagacccaccactcgtgaacctcgtgaagctcggatacagccgtccctgggcgctgcaattgctagcgttggccgcattacaagtgcagttggcacgccattgccttcggtaccggctccatctacgccttcagccaacactcaaaacagtgcaatctccgagtctgatcgaccaggggcatttgattctggaaccttttcaagcagaacacccctgggtcagtacatgcacgacacagcgcggtctgatcgaccttcctctgactaccttccagactcttcgagacccacttcgaagatgactacagaacgcgagaaaccgccagtctcgtttgccgatcagtcacccgaaaaggcttttggtgaagactcgccgagacctggcttgcaaactcgcaagtcgttcggtccagagttcgactttgaagagaatcaagtatccttccagcgaaccccccaacagcagcaagactcagatgacgattctgatgatgactcggacgatggcctattccaagtccgaccttcaagggttcaggaagaaccgaaacaaacacaaaccgaggccgaaaagaaggcggagaggccatcgctgaccgtgaacacgaaagatcaattaagatcaaagttatctgtcaggttcaaatctccgagtactgccggtcctagttccggcggagaggcatctgatgggaaggaaccggtttccagtacctggggaccagtctcgcctgaagatgagaggcctggaccacagcgagagtcatttgctcgagatatctgggcaagcagacctgccgtcgaaggcgttattgaccacctcgatgacttcttccctgatgttgatcttgacgctccatacttggatgagccctcatcacccagtagcaagactatcaacgaacatgacgcgaacctcaaagacaagaaggaagtaccgccacccatgccaaatgcaccccatgcgcctgatacagcgccagtgagaccgcccgaacctgccaactttgctcgacagaaacttgctcgtggtggtgtcggtggcggcggactctctcgcatgaaatctattcgacaggtggcccaaggagcgaaccggacgaacagcgttcatgctggtccgcaaaggtcgggtgatcttctacgccgaaagagtaccaagatgttcggcgccaaaattatgcaaatcaggccgaggccaggtacccggcttagccaactcgatccgattccgcaaaacagcgcccaactggcgtccaatgccgggcctgttcctcagcgacagcccactttccgcattatccgtggtcagctcatcggcaagggtacttacggtcgcgtatacctaggcatgaacgccgacaatggtgaagttttggcagtcaaactggttgagatcaatccgcgaattgcaggggcagacaaagaccgcatcaaggagatggtcgctgccctggaccaggagatcgacacgatgcagcacctcgaacaccctaacatcgtgcagtatcttggatgcgagcgcggcgaattttccatctccatctacctcgagtatatctccggtggatctgtcggaagctgtctgcgcaagcacggcaaattcgaagaaagtgtggtgagatcactgacgcggcagaccctggacggactggcatacctgcacgacaagggaatcctccaccgcgacctgaaagcagacaacatcctcctggatctcgatggcacgtgcaagatctctgactttggtatatctaagaaaacggacgacatctacggcaatgactcgtccaactccatgcagggctccgtcttttggatggccccggaggtcatccagtcacagggtcaaggctacagtgccaaggtcgatatctggtcccttggctgtgtggtgctggagatgttcgcgggccgtcgaccgtggagcaaggaggaggctatcggcgctatcttcaaactcggcagtctgagccaggctccaccgattccggatgatgtttctatgaacattagtcctgcggctcttgcattcatgtatgattgcttcacaatgtatgtcttcgtctgatttgttcttggatcgcctgattatatttactaacgtcctccagtgactcggctgaacgtcctactgccggaaccctgctcacccgccatcccttctgcgagtcggatccgaactacaacttcctagatacggaattgtattccaagattcgcgatgttctttgagttcccttggtttgatttcttctttgactgggttcggcgtaacttaacgactttgcgctttctcctatcgaccgtacatacccttttcttttacatgcttgaggccaaatttcgtctggattctttcggctttctgatcagctgtacatacttttttcacgtttgtggataataacatttaccggggaaactagattatttccctctttacggtccaattgtgatacgctacaatatcatcaagctgctatgaccaaccaacaagaatttatacaattcctcgctttagacatgtacagaagtgctcaattcaacatggtatctatgctcaagaaggggatataaaacaaaaaggtcataagaacgagtccaatcctaagagctggtgcttaggagatcatcatcgtcctcggggatatcggcctgcaacccagcgacaccgacgcggaacacaccctcacaccattcggcaaaggtattaacatcccagacagcatcgtcccgacccttccctttcttactaacaaaattgcccttcgccttctcggaggaagtatacttttcaaagaaatcctcgtaaatctgaatagtgcggtcctggaccgccccaacaagcgtctctttcatacgcgtgtcgtcgatatactcattcaagaccttgcgcaaacccggcacctccttctcgatagtgcggcaagaaggaaggataagttcgccgcgggcaaggttacgggaatcgatgaattgagccggcagcgaggcggtcatgcgagcagcaaaggcattgatgaagtcattgataaccgtgcgaaggcgaccatcaagctcgactttcgcgtcgagcatgttctccacgacccgcgggatgaggccgtggcccaccaggcgcatcagattacgcgggttgaagaggccgccgcgttcgcgcagctcccagaatgtacttgtcatgccggagaagtcgaaggagatatcggcggagacatattcgatgtcgaaggcgacgatttgttgctttaggattaggaggtggctcattaggaagagttggctgtcggctggtgtggctttggcggctattagggtgctagcgttttggagagagagggttgtttggtgcacgatttggtgagctaaatcgtcgaagacagtggactagggtggtcagtatgggtgggtaattaggcctgttgcggggaggcatcttacattcactaggcggtatattcgactcagaagccatattgcttttcgcagggttggataccagcccttcagagcggtctgcgtctcaaagtcccatttaccgtctagctcttgtgtagattcgcctgtgtcatcgccttgtttggccgtcatgtcgactagtgtatccgcggatgtgtccttcttgcccgatatctgagtatctgacacagttagggatacctgtcgatttcgcatggggtaatcagtgtcctctgggcgaggtttgtatcgttcgatttcgtcgcgcagaacagctagagcacggaagacaagccgggcctggacgtcttgtaaagcgggctggatcaaaatagaaaagtcaagatggttcgtttcaacctgttcgagttcttcttctgggtccgagaaatagcgagtctgcagtagattgcacagctgacatagtctgacgatatcagactcgtgaatgatccgtggacgaaggtgatcataaagtggttcgcatagcgtctcaaggaagtcatataaacctccctgtccgtggaaccattctccccatagatcatattcgtctaggcataggccacggatataactgatgctagctcgagcaaaggcaaccaggtccttggacgaactaggtgtctgtgtgatttcgccgagctttttgcgagcgagcggaagtatcagcttcgcacgggtagccgagtaattgctgtgcagctcgttcatcaggctttgatattcagcttcgttattttgatctgggttgagcggtggtacggctctcttttgaatctcgactccaatctgcttcagttcaggtgccccaaccctaaatttagcgtacaggagagccgacagagctgtgtcattcaattgctgatccgatatctttttggagacgctctggtaaatatccttaagtgaagatacaaagttgccgcggataagcgtcaaggcacgcgttagcagtagccggtatctcgagcgatatacctctgcctctttttgatccggctgcgtagagatcagcgatgcgcatgaatatccccgacttgcttactcacatgtgtttccatgtaatccaagcacacgtccagatgcctcaacatatctgagaattccttgtcgcgaactgtattacccgcgccgggagcattcaaccgccgcgatgcgggatctaagaagtcataatagtggaggttggtctggataccattcgcaagtttcgtatcccgttcctgggcagacaaaaggccttggcattgcttctcgaaattccatgtttgtgtctcgaccgatttgaatgattcggacaagctggataggtcacccagaagggtcagggtgttcgttaagatttcgtcaatgtgctcttttgattgttcaagttcatccaagcaattcctttaaagaaatgaattagtacgcctccgataaccgtccaatgtcaatcgtactggtactcgtcatagctctcctcaatcaagtcacccttgacaccattaaaccactgtgaaaactcaagttcgttgctccatcctgccgttttccattcaaaagcaccgggcggcttctcgtccaatgcttggaggcttgattgggtttctttggcggtgggtttgcgcggcgggccggagggagcggtttggcggcgggcacgctgctgctttgtggaaggcatagtgtggtcaaggcccagagagtgcgatgggagtcaacctgcagctcatatctctctaccgactttattctgagtaaaattcaggccaagtttgatgttgaagccgaactgcgatgtgttcaactccgagacggattctgccgatagctcccgcctagattgctgcaacaaatcacaggcccggcattaagagcttccccggacataatctcacctttccagcttcggtatgctctacctggtgattcagcaataatctacaatgttcacaacccaactgcgacggcccgcgacgcactccgtcctcgctttccgcccactcagaaactcgacggctcagtcactaaatgcgccatggtcccgatctgccagcagtaaatcgcgaaaggcaggcccgtcatcgcactggattcgcaattccctcgggtttgccgtgacaggaactgcagtctttttgggatactcatacgtggctgatggtggaaaggaggcttggttcagtcgtccgcaggttataaagaaagagcccgttgacgtcaacgatctcgaagctcagttcgtccaagaaaaacgaagcctgaaaagccccggcgtctacacatgggggtcgaacgtttatcgcgtggtggatccaggatctaaagataccgatatcaagactcctcggcgcttcaaatactttaatggccaggttctgagggatctcaagatcgaggaaaagtccggtgcagcaatcaccgagaatggagatctagtgcaatggggccaggcgttctcggagtcggacttcaaacccacggtaactctgactggcaggaatctcacctcactcgttctgtccgaaagtcgaatcattgcgctgtcctcggatgggactgtatactcactgcccacatccaaggatgggcaaaacaccggcccaaagacaacggaaagctcttgggttcccttctggcccaatcagtctaatctgagctaccgtgtactgaacccatctttgaagcttggtgaaaaggtcaccgcaatcagtggaggacaggaacatgtgctgcttctcacaagctctggtcgagtcttctctgcggcgtcatccaccgaaaattacccttcgctaggtcaactcggtgtggagggacttacctggttcaccagacccaaggggccagcagataaatgccatgaagttacagctctcaaaggctccaagattgtgcaaattgcctgtggtgactaccactcactggcgctaagcaaagatggccgtatgtttggctttggcgacaactcatttggccaactaggtgtggattttgaagctgagaggtctttcaaggatgctcctttcgaaatcaaggctcaaaaactctatagcagaaaccgctatctgcccaaggttaccagcattgctgctggtggcgccaacaccttcttctccgttgatgccaagcgcattctagggtacgaagaagaggcagccgatgttcatgatcttggaaatgtaactgcagacacatgggcctgtggtaggggaatttggggtactctcggcaatggcagatgggttcacctgcaggattcgcctaccaaggtgaaagctttaagtggtgtgagcgagtatgacgagaagacaaaacaaatgacccctatccgcattaggtccatgtctgtcggtacaacacatgtcgcggctatcctggacaacaagaccaatgtcaccaagactatcaaggacactttggatcaaactaaagactggggctatgatgtactctggtggggaggcaacgagcatttccagctggggacaggaaagcgaagcaatcaatccaagcctacttacatcaacgcaccccccgaaaacaagaaaagccagggcgaggcgcgattgcagatcatgcctcgtcacaagggcaaggtcgggaagcgcaatgtgagcatggaacagcgtgttgaatgtgggcgtcatgtctctgccatttattctgcggtgtaaaggtaaaaaaaaaaacctgtatattagtgatgccatatgaaatgcaattataattcgctttactcggtcggcctgttgtttttcttttggtctatagaatcaatcaatggatggcggcaattgcaaacagaccaaacgcttatcaccgcggagacgcttggaccaccgcttatccaaaaaatttccagcgcttcaagaccatcttctctcacgacacacctccataatgcctcgtgaacaacaaaaaagaggccgcagggccgagaagaaagcccaaaaagaggactccaagagaaagttcgaggaaacccccgaagatcccgtcgcgaagcggatgaagccctctgccgacgacaccaacgagaccaacgatgatatccaaattgccggaaatgaggactacattccccttgacccgggcgaagagcaggaagctcagcgacctgatgaggatggagacatgcctttctacggtcttctagacgaggaggagtcagaatacttccagcgcgccaacgaaatgctggagctgaaccagttccaggacgccgaagagcgcagcttgtttgtcgacagtgtatacactgaagctagtggcaaggagttgaaaattgcctgcagtcagggctgttcgcgactcatggagaaattgatctcaatgtccgacgctcgacaattgcgccggatattcagcaaatttatcggccacttcctccacctagtgcagcatcgttttgcgagtcattgctgtgagacgcttttcattcacgctgcgcctgctgtgatgcaaaaggtgaaacctcagcccaaaaagtcagacgaggaaggagaggaagagccggagccatcgatcgcagaaatgttcatggctgttattgaggaattgaaggaaaattgggggtacctgttgacggagcgctttgcgtcgcatacaatccgagtgctactgcttgttcttgcgggcgagccggtggatgtcacgtcaaacgagtcgtttgtcgcaagtcgcaagaaggaaagaattgagatcccgactgtccagggcgaagagaaggcagcaaaatccaaagccgagaaacacactgttccagagacattcgaaccggcgctcaagaagatcatgaccgatatggttgccggtctcgacgatgtttatctccgagctctagctacgcacccagttggaaaccccgtacttcaggtattgttgttcttggaactttcgcatttcggaaagtctagcgccaaagatcccaagtcgaccatccggagactggttcccgatgagacgtttgaggaagattccgaaagcgctgttttcattcgtggtctcctctacgatccagtgggttctcgcctgctagagacgatggtgcgatacctccctggtaaatcattcaaaaacctttacaagaacaacctgggtgaccgaattggttccctttctcgcaatagcactgctggatatgttgttcttcggatgctcgaaagactcggtaaggatgacttgaagatcgccatgaccaacatcatccccgaaattccgggcctaattgaacggtcaagactgattgttcccaaaatgttgatcgagcggtgtgtggtccgtggcgtcgacacaaagcctcttgccgaagcactcgagggtgcttatagccaggaccctgttgtcagactgcagcagatgctcaagttcaacatctcggagagcacagccccggaacctgaagaccatgatatggacgaggacaacgatggaaaggaccgcaagccacggggcccacccccagtatctgcggcggagaaagccgagaaactgcatggctctctgttagtacaggccatgttgaccgttcctggcccgctgagccaacttgtctacacgagtctcctcgcccaatcatccgaaaccatcgtacaacttgcccaagaacccacctcttcccgcgttctccaacaggctctgacttctacaacctccacgcctcaaatccggcgacaactcaccacccgtttccagggtcatctcacacctcttgccttgagcagcagcgggtcacacgtagtggatgcgctttggactgcaaccaaggacatcttctttgtcaaggagcgcatggcgcaagaactcgagcagcatgaacaggagctccgtgactcctttgttggtcgtgcagtctggcgaaactggtcaatggatctcttcaagcgccgccgacgcgattggactcacaaggccaagggctttgaggagcgaaccgaggccagtgaaggtgccgaacgtcccaagtctaaactagaacaggcccgggcccgttatgcggcagcaaaggaagcagccgatgctggtgctactggtgcaaaccagactgcggtggctagcagatgaagtggtacaatggtgatcaaaaatttatattagacgaaatgcacatgtactcataaaaaggcgttgatgcattcaattgtttcattgctttatatctatttccatacctttcttatgaatcgatattatatttcaaaacatatcagagatatcttagaaaattgataaattgtatatagttcatcgaccacaataccgtgagggtattcgggttcctgcagatcagcccgaatcttaatatccttgtctgcatataatatatgcaaggaatctacggagtagttaattgggagtatacaaactcaaaactacatgaaaatccgactcaaaaacattctactagccgagtatagatcatcgcatgagggcttaaggtacggatgatgtcaggctctgcgggattgtcgccatttccgtggtcgccggtaaacttttctttccttttcaattgcgtcttctgtcctctttttcttttctgtttcttctgtatagaatttgcactgtctctccttaaatttgcatatactagaacgtgagaatctgtacaaatgtctggcattgcgcagcccaatcgcgctgatgaagtgcaaagtgtgagtcaactctatatcgcaatgatctacaccccaccagattctttattcgatgttctgaaactaatgcgagcaccatgctcagcttctgaaagcggtggaagaccttctcatcccctttatccgatccgcagacgaggatccccgcgggtccttgacacagaaaaatggcaccaacggcaccaatggacacactggactcgttggaacctcattgatagattataagaagcctgaagagctgcaggatatccttcagcttgagatcccagagaaaggcaccaagcaggaaggtctcattgaagtcttgaaaaaggttctgcaatactcggtcaacacctggcaccagggatttttggacaagctgtatgcgtcaaccaatgcgcccggcgtggcagcagagctcatacttgctaccttgaacaccaacgtacacgtctaccaagtgtcccctgcgctgacggtcattgagaaatataccggccagcggttggcgaacctcttcgggctgaacggtccacaggcgggaggcatttccgtgcagggcggatccgcatcgaacaccacctccattgtcattgcgcgaaacaacctataccccagcacgaagacagacgggaacggcgggtacaagttcgtgctcttcacgagcgcacacggccactacagcgtggaaaaggcagcgcagatgctcgggttcggcagcagtgctgtctggcccgttcctgttgacaaggtcggccgcatgatcccagccgagcttgagaaactggttcagaaggcgcagagcgaaggccggacgccgttctatgtcaatgccaccgcaggcacaaccgtcctaggctctttcgaccccttcaacgaaatcgcagccatttgcgaaaaatacaacctgtggttccacattgacggatcctggggtggctcgttcgttttctcccagcgccagaagcataagctagctggcgcagagaaagcaaacagcatcggcattaatccgcacaaaatgcttggcgttccggtcacctgctcttacctgctagcctcggatatacgccagttccacaaggccaacacacttcccgcggggtacctattccacagcgaagaagacgagcccgctaccaacggcgacgcaaacaaagaatccgagttggaagtcgactcaccggaagtgtgggatctagcagacctcactctccaatgtggtcgacgtgcggattcgttgaagctgtttttgggttggacatactatggcaatgagggctaccgacagcagatcgactcggcatgcgacatcgctgcgcacttggctaataccatcgcgcaacatcctgatttcgttcttattagcgaaaaccctccgccctgtctgcaggtgtgcttttactacgcgccaggcaagaagttcgtgtacccgcgtggcatcgtctcgaatgagacacagcgcgggaagaataacagcaaggtcactgagcaggtgacgcgtgcaatcgtgcccaagggcttcatggtggactttgcgcctcccagtggagaggaggacgaggatgcagctgggaatgggaagttcttccggtgcgtggtgaatgtccagacgacgaaggagaccgttgattcgcttatccgcgccatcgaagaggtgggtcctggtattattgagtctttgaaggcgagcaacccggcgcttccgcacaagcggcctggtgagcgtggacacggacctgttgtccatcgcgcttgagcaggtgcgtgatttgttttcttctgatttacttggtatataaagtagagcatgtggatatgagagatgggatacgacatacaaaagatctggtgaaatatataaagctgtgtatcaatttgacaccctaagaacaagatgagcgaatatctcggcgctcaaaatgcagaggatgtagagcagtcggcatagtttctaactatacctacctggacagtagtaatagaatttgtgcaaggagaatagcttgagtatagaatgatatcaaagccatcaattgccaatctcgacccttcgttccaacacggaccgagcctcagcttccgatagagagtcaatctctaattcagcaagcacagcccgtgcactctcgttgtccctgaacaacctcttttccacatcccatagccttaaaggcacatcttcctctgtagagacgtccccctcttgcttagctgtacttaagcaaagtatacgcagtccctcgttgagctttttgatggttcgcaatgagatccccacctggctagatgcgccgagcgcagaatccacaacgtgacagagatagtcgacatcgctcgcaagctgggccgctccagtctcggaaaaggtatgtttggtcaagacgttgtcccagatattgctctggatcgataacaggagctggcgcgagactcgtcgtagaggcgcagttccgagcgcccgagagaggaaggatagttgtgcggacaagacacgcattgcaggggcgagatcagaagtgggtgggaggggagatgccgtcgctgtggcagaagggggtgacagcgttgcccacgtagatacacgagagtagggcttcagagccgcgaggatattggaggacaaggtggatgtgatgatagtttccgagcgaagtcggagacgacggtaggcggatgccgtctcatcgaagagagcaccatcggatgaggtcgcggtgtggccgccgttgttgttattagcgactgcgggtgacgtacgcgacgctacctctgcgacagacatagtaccagctacgctgcgaccgttgtctcggttttgttgaacccgatcttggagctcggaccagagctcaacgaagaacacatcattactccaatcctccatcttcttttcgaggtattcggcacttccgaaaaccctacaaagccgctccagtccggcgacaccctcgacgctggcttgcccatcggcgccctgtacagtgcgtccaagcgttgacgtcatcgcaaggtaggcctctagtgcagaatagaggcgctcatggaactggtcgaaaatcgtgatttgaatgtcaatgagaaaccgcagcttctgactaaaggaggatagtggttgatagcgatcggttatagtttcgagaaggtcattcacgcggatcgcagcctttgtcggtttcgttgcagtgagctccatgccatcgtagtcgatctctccactgtccgcggtgtcgatgatatctctgtatcgcgccaatgcgaagttcttctcaacctgaagccatcgatcataccagccctgtttggtcaacacttcccaggttatgcccttccaattgtcgtccgcatatggatctggcgtatagttccatgtttctcgcatctcgttatcgaatttcatcagttcatgaatgaattggctgagcaattgggggtagtttgagatttgagggaggaacaggctgatcttatctctcagcataggaagcaatgcagtaatgtaactatgtgatgcattgtaaaagttccattctagacttggaccgactgcttcggccctttcatcaaagatgggctgcaagtaagacacaaaaaacccgccgtattggttgacaaggtccatgatgtgcgagaggaaatattccggctagaacccaagttagacttctattttgcgtagagctagggacaagttaccttatccagtcggtttgttggcttgtctccactaaagtgatatttgaagcggagatcgagatgatgcaccataacctctagtgggaatagcactgggggctcgaagttcagttcggaagctagtgcatcccggctttggagttcactaaaaggggcgtgttagaacatttcccagacatgaagggacataccatacggtaattgtaagtcgatcaacagttcaacatcttgcttccagcggctcaggagctggtcggtgacattcagttctcttgtcggccatttcatatcttccagcgttttctgtagccggtcaccaaagtatttcttcatctgttgtctcagtgcagatgccagtttgtctgtatagtcgacaagatggggggccgctccttcggcagcaggctgggcatccttcagtagtccgacgatagttcgtagtcgggaataaggcttcaaagcggcgcgtggttcggatgtaatgtcttccaaagcttgcttgctgtattgctgtctcagtatgaagtccctcacgaatgatcaagtgggcactacctcaattcctcggcttccttgagcaactccacatatcccttggataattcaagccgctggagcttctccatgctcttctccaaactccgtactgcctcatcactggtttcggattgtgtgatggccattaaacgtcggtcgatgtccgcttgctccgcagtgaacgcctcggcttgctttcgagtggcttcggcatggtcattagaggcttttgtcgcatttgagagtgcttcgctggcttccgctagctatttggtcgcgagtttgcatcagtagtgtttagaaagagggtcatggctgtgaggggcggtacctgcttccgctgaagctcctgttgcgcgcgtagactggacaacagcgaacctaaactctccagatcggcagaaacctgaatcttatcatttaaataatcttcgacccgagtccgctcatgcgaagataattccgtgagggaggccattgttgaaggagggaacttgaccgcggaagcgcaaggtgtcgcgaatgttgatctccgccttttggactgacgtcttccccagtggcaaccatgagcttttacattgtcaacactttgaataatgtccagtccagccaagaagcgaaaaagaaatggagaatcatcgcagccgacgcgcagtatcaagtcgttctttaaaggacagaccactgaacaagccaatctacaaggccccgatgtcactgagcaaaggctctctgatgaagctcttgcgcgcaagctacaggctgagtggaatgagcaggaaaatgcaagcactcctaccgatgccaaagcagatccacagatcaatccagttccatctacattagactcgcctgttttacccccggtagcgccagtgataccaaggaagagcactctctcattacagtcatcatctggtacggaggatacaatatccctttcgattcctcttgatcaaagcccccagaccttcgacgcgagtaaatacgcagcagaactgcggtcgcactgggcaaccgaaggcggagatgcttcttacgccttgttaacgagagcctttatcctggcaaatgcaacgaccagtcgaataaggattgttgatacgctggtcaactttcttcgagttctgatagaaggtgatccatcaagtgtcctgcctgctgtgtggctcgcaacaaattctatatcacctccatacgatgaattagagctaggcctgggagggtcttcaatttccaaggcactgaaaaagatatacggcctcaatagccaagggctaaagaccctatacgataagcacggcgatgcaggggatgttgcattcgaagccaagaaacgacaatcattcactctggttaagccgaagccattaaggatcaagggggtataccagtcgctgaagaaaatcgccactagcaaaggacctggtagtcaagaaaccaagcagaggatcgtggagaagcttctacaggatgcgcgcggcgccgaggagagtcgatacattgtccggacattggtccagaatctgcgaattggcgcagtcaagacgacgatgctcattgctctcgcacgggctgtcttatattccaagccagccgaggcagatttcgaggtgcgtccgtcgcatcaacttgcacgcttgaagaaggacgaacttgcggaaatctacagcaatgcggaagaaatcgtcaaggcgtcgtacgctagacatcctgattacaatgatttggtaccctgcttattagagatcgggcccacagaagagcttttgatcagatgcggcctaaacatgcacattccactaaggccaatgctgggcagcatcacacgcgatctgtcggagatgttgacgaagctccaagaccgagacttcagctgcgagtacaaatatgatggacaacgtgcgcaggtacactgcgacgagcaaggaaaagtttctatcttctcgcgtcatcttgaaatcatgacggagaagtatccagaccttgtgtctttggttccgcaaatacgaggagaaggcgtgtccagttttatcctggagggggaagtagttgccgtggaccgtgagaatggcgatcttaagccatttcaagttctgaccaatcgtgcaaagaagaacgttgaaatcggagacatcaaagtcaatgtctgtcttttcgcattcgacctaatgtatctcaacggggagcctttgctagatcgcccctttcgagaacgccgcgagctacttcgcagtctctttgtagagattccacaacacttcggctgggtgaagagcatagatgcgacatcggcagattctgagcctgtccttgaattcttcaaatccgccctcgacgtcaagtgcgagggcatcatggtgaaaatcctcgacaaccagcccggcgcgaataccaacaacctctcctccgaaacagatatcacaatcatcgagccatcaactccagcaacatccgacccaaccaaccccaaacccaaggtaaaactcacccgacgcaaacccctcctctcaacctacgaaccagacaaacgcctcgaatcctggctcaaagtaaaaaaggactacagcacctcctccgaaaccctcgacctaattccgatagccgggtggcacggccaaggccgcaaagcgaaatggtggtccccaatcctcctagcagtccgcaacccagaaaccggctccctggaagccgtaacgaaatgcatgtccggtttcacggacaaattctaccaaagcaacaaggaaaagtacgcgcagggcagcacaaacgtcatctcgcgtcccagctacgtcgagtaccacggcgaaccagacgtgtggtttgagccgtgcgaggtgtgggaaatggctttcgcggatatcacgctcagtcctacgtatccagctgctatcgggctggttagcgaggagcgcgggttaagtctgcgcttcccgcgatttatcggcgttcgtgaggataagtctattgacgaggctacctcgtcggattatctggcgttgctgtggcggaagcagatggagcggacggcggaggctcggggcgttggggaggttctggaggaggggatggagtagacaaggttatttgcctgttcatataaacaagctcatgtgaattgcctttcttggtactccatgcagcacctttgactgcaagaatagaccttctatgatctaataatatcggagatgctatatacatctcaacatccccctcactccgtaagtgtaaactattctcaatggtatatttccctttgaaatattttttgtcgacatggccccgtgtaaaccatttcgatatcttcctctctacgcgctctaataacctccgtgctagtggcggaatccaagcaaaataggcttcagatgacatcacatttgactttcagtcccctcacctctgattggctgaccccaaagcttcttaatctgcgacgcgaaagtgacgcgaaaagacgcgaccggattggacgtgaaaatgaggggttgactacgtggtccaaagaaaatagtcgcttccaggcgatcagagatagggaagtctgtgtctatgctgggatgctatgccgctccagggtgatctaaattaagatgtgtagtagggtttaggtgttgtggtaataagcattggacctcatttctcgaggttgaacatattccattcatcctgtgtctccttatatcaacagagatattaaacagtctcatcaagggcatggtgttaaaaaaaaatagggtgaacagtgagattgccgaccgacggcagacaatggcatagaaaaagtaagacatatgtctttgctgaaggagagggtaatgaaagacatgatagcaaagcatttgtaaagacaacgcctgtggatgcaagtccgggtagaccttcccaatcgagaatcatgtctgtcttcgagacagcgagcctgtacactggagaagagggcaaattacataggggatgaacacaatgtgtatacaacattattataacaaagtcgtcagtggggtttaagagggaggtagggcaaaaatgaacagagaagagaagatgtaaagacgttgggcatcatgggtgcagttcgccgccgagttgtaacgccagccccgtttccttgctacggagtcgagggctggagttgcttggaggaaccagggcatcgaagttcaatcgcttcctgctgctggtgagcggagtgcgagcagggttgcctggggtacggctactccaggttggctgcgccgggctcggggtcacattcacgaaatcagcgaaattgaattgctgattgggtgtgctgatgttggcaaacatgccagcgcccagtgtaggtgtcatgcctggcagcagcgcgtgctggctgggaggagtggaaggagggaaggccaggtttccgttgccccttgcaacccgagcaggggtcggagagttggcgaggtacaaaagcaaatccgcaccatcctcgtggttctgaggttggttgttccgggacaatcgcatatgttttgggggaggggttcgtggaggagaggagcctatgacggagctgatgtgttggaaactgtgtacaggcagatcgggatcgatctcttctgacggtctggggtatacaggcgatgacacctccgggattatagcctcagacatgaaggggagttgtgtgcgtcggctcggacggtgtcggttcatgcctggggaggattccggcagccggtgagaactcttccacgagacccggtgtaccttggcaggacgctcggaatcagagtcagaccgtaagcgctttcgactcgcggtcagcatcggctgcatgactcgagagttgaaggtggcagcatgtttgttgcgggcggatcgagggagctctttagagtaggtagaggcttggaggggaggagaggtgaacggggtctcgcagcgactgcgtgagaactcggatgaagagtcggaaggcttgtcagtctcaagaactggtctgccatcgtgctggtgcgggttcaggccatgcaatcgaccgtgttggtacttgagtttggcaaggcccaagcgatcctgcagactgagagaaacctgtgcgaagagaatccagggtcagtcccacatcaccaacgatatcatttggaagcattcagatgcagtggcaagtatttagactagtagccgagactgcatctcaagggatgcggagcctctttttttttcatcgcttacctgggcgatatcgattttgcggatcgttttttctgccgagcccggctgtgagggagacattgtgtaaggaacccaatcgaaataatcaaactaaacaagacacccctatgcaagaaaaaaagaagacgttttgaagagagtgtcgatgttggggtttggggggagtaagggcgaaagggaagggtgagagattggcgaattgcgggaactcggagaccaaatctggagaagcacttgaacagattgggatggaaagatgaaagaaacccatttttattcgctggacggtgttaaacataagacatggggcagaaatgtgtctctttgtttcttattttgaagtctcttgaatctgtctttctagatctactctgaatatgaactattccgtatgtacggggtacggggaagtgtgtactccgtttacaggtagaccacgacctctatatagtccatgcgatcactacccagctgtttattcttgttgattctttgatgtgagagggtgctccccaattgagctccatcacgcactttttatactccatccaatctcagggtcttctcccagaacaagaatgttctttttccgattcggcgatctccatagaaaccagacattcagccacagattgcgatccacttggactggggaatgaggtcgtcactcccctgaggtatgccctagatcgccggatgcaatttatatacttacgtgtacgcaatatccaattcaatcccatgcgaatcgcaccccatagcaagaaagaaaaacgccattggtattgaggctgtgagacggatttagccatgcatgcagccctgttatcaaccccgttaagattctaatcttggaagagatgtgggaggacgattttaacaggagccacctacgtaacgccgtaaatcaagagtctccagatatgcagcataacgtcaggaagcctgtaggaaactaaaaagtacagatggccatggacatgccgtgttcatagcccggtatgtgagcccctcgcacgctccaagctaagaacattagcgatccccgatccacagtgaaacattgacttaaaagggttggagctgagctgataacagccttgggaggcataatgcggtttgggcgcggattgaggtacgtaatgtcgatgtagttaattaatattctggaactagagggggaaatctcagatcggcttttctttctttcatcttctcaaatcaacttcattttgaccatatcaaccagaatccatcccctttccccctatttggtgacttgcggggcgacttgtcgtcaaccgcaaacggttaccctgttcctgacaatttaaccccgtctgaaaaaaataacatcggggcagcttcgtccttctctctcctctcaacctcgccatgccgttcttcaaagacctacggcgtcgatcgaaggccacttttcacaagaccccatctcatagtgtggaggaggtctccgggaaatcgtcatccacaatcgacacttcctcccacaactccatcactccaccgtcatcaatcagaccaaccctttcaacccctagtcttccagcactcaatgagtctgaaaccaccagcacagccagcttggcaccgccgtcacagcgcccggggcctttagcgaccggttcgcagcgaaacagcgttatcgtacgtccaccctcattccccgcgacagctgaccatactgaccctgatcgcttgagaaaacagggtagcagctcgtcctcggtcaatggcacgtaccgatcacaggctccggtctcgccttatgcaccgagagtggtgtctgtggcggataattcatgggtatgtttctctgtccggcacgaattggaggccgatagtgttccggtgacatgaaatcaggtatctaactatcatgcaggtcaaccaaaaagtcctgctcgtctatggtcaaatcaacgacccaaggcaacagccgctcgacggaaacatcaccgtctatcaccaccaagataatttcccgtcgactggctggcccgtcacggcatcgcattttaaagtccttgttcacctagttcccggtcctaatcgccttcgctttgattttgtttcgccaaaattgtccacggggagcattcaccccgccatccactcctcctggctttgcattaactaccttcctctggttaacaaccccccattgcagctagtcgttctcctggggaaagattcagacggcacatacgatgcagtaccggaaagggtagagcgcgaaggaaacgggttggaaatggccattcgaaagtaccgcatggctgcctatctctggcaggccttcactggcgaacagatgttccgcaataatttcggccgacgttgtttccgattcgaggaagagtggcagtctggtagcttgagccgtcgcgactcggcccaaggtcagatgcggaatgaggccaagattcacgtagtccgcactgagaaaacagtcgccgaactccgggatcttaacatcgctcagcagaatgggaaagccgagaagaaagacgagttgttcgccattgctaaagacgcggtgcgaaatcatttccggccccaggccggccagaagcaatacgtctccgttctcctcctcgattctcattgggataccgaatctcagatgatcaccggccatgcagctttaggttcggctgacagcgatatcaaaatggctatatttgggtctcattgtctccaaagctatccatcgtgtctggaagaagtcgtggatgcgttctcagactgcacccgcacggataccaactacgtcgccaatgactgtggtgaggcgggctccaattgggagtcagcaaatctgggcatcggggctcacatgcacgaggtgggccatctcttcggatgtcctcaccaggagtcgggcgtcatgcttcgcgattatgtgcgtttgaaccggacattcctaacccgagagccgttctcaacacgtacaaaggcacaagggttgaaggtgtgtttgcccaacgacgagtgtagctggcaccgcctcgatgccctacgcttccgattccaccccagcttccgactcccaagcgatccttctcccccttcggatgatagcgtccacgtgtggccagtcgagaacggcaagatattgttcactgcctcatcggggatagaattcatggagctatatgccgagggtgacaccctctgccacaacttcatcgagtacttgaacagtgagtcgagccccaacggactaccacgacaagttgccgtgacggagatcgagcttcgtcaacgtgtgtatggcactgagaaggaaaagaaaaagaacatccgtatggttgtctgctctggtgcactgggcagctatacggttgagaacattggcgatctgaaatcgaaaaattctctcgtcaaattgcccaaaggccggtctggttttaaaagcggcaaattaggccagtcggcgatggaaggcagcgaacccgagcagttgttactggaatatgcgttcatcaattcaaagctcttgacatcgatcaaggtctaccatggctttgcgctggatggtatcgagttctgctacgaagatgcgaccagtcagctgtttggcaagcggggaggcaaacctggtggtgatgagttcgtcctggatacccgacgtggggaagttctccttgggttctatgtccgagctggtctctggattgatggaatcgagattctcacgagtctggggagaaaatcgggtatctatggaaaccccgccggtggctcagggtacgtatcccctattacttttctctacatatgaagcatgctaaccaatgtgcaacagccacactttaatccctcccttgggctacaagattgcgggaatctctggttcctgcgcatcatggattgatggattctcattgatcatccagcactgatagcaattgtccaacttttctttcctccgtctctgagaggtcctcatgcctcgaagctagccaaatcccggtgaaccatcgtacagcatggtggactgcgaatgactgcagggcatcctcctcgtccatctcctacaactactaagccttgccttttcttgcatcttttaccctcttttcatccctctgggaacagacaattccgcgttccgcaactggcccttggctactatatacacgaggttccgtcggattttgtttgtgtctatatgttttcttctatttcattttctgtcacacatcggcgtcatcggcgtgttagggtcgcatgtatgcatgctgatattttcttcgacgttagtcccgggtgcatggactacacttattggtaatcatcgagcataccgatggccacacacagcaccactgaatcattttgtaaaggggcatcattcatattggttggatagttcatatagagtaatgtcatgaaaccaccgtcaatgttcgagaatgatccagagtaatcctacactttgtaattaagacgctggtaaatatccacagggtagattccgaattctcacgggcggtcctcatacatctgtccaaacttatctcctgacaacaactcgaaagagacaaaaaaaaaaagaggaacaccggggtcattgaccggaaccctactacacccgcatggaagcatagtactaagtcatgttcacaattacgaactcaaatgacccctcacaatcccaatatctatgattcatgccactgtgggcgaagtctctgtggttaaatccacagccctagaaggatcatacgatctacattcgatgtagcttattatgatcttcggtgcatattcattcctagacagaagcattggccagccaatccggggagggtcgttctccccgttgatccccgttgttgtggagtggaacgagagacggcacaaggaacatatagccatctagccatcagatcaccaatctcccgagagagagacagggactacctaggtatatcggaacctcacgccgattgtcggcgccgggaaacgtttgacacgttcgtgggtatgtaagatatggcggaagggagactagacctttcaacgcaacatgctcaccatatatcatgatatgaatattattgtgtggccccatctgtaaaattggctgtttcatgtcggtatatatattattaaagggatactgaatgaagccctaggccgaaggatgttcgtctatggatagaaagaataatattttgcctagctgagtagttgtgtgaacacccgccgaccccgctataccgcgtgcgaactttgtatctagtttccggagaatataaacgtgccaatcataaggccggaaactcgtcacaaagtagatatccacgttttctaaatacagctccccagccaatcaacgagctttggccctgtgctttggattttttgacacatccccattcagagtgccatatgcacaacgtctatatttacgcgcatcccattcgtgccgacgctgaaccggggtgggaacccccgtgtacatgtacctcccgtcgagaatggggaaatgctcgtggcggaaacgaagctgcgtaagctgtgccgtcattttctttccagagctcggggtgcctgagctcaaggtggccagaccgtttgttggcctgactggctgtttgctagtaaatccactgcaagccagggtagatcggcccctctccccattgccgatccccgatttccgattttcctatatattatgtggctttgggtttttctcttggttgcccttttgcgctaggcgtgtgggttttgcagggggggggggggggggnnnnnnnnnnnnnnnnnnnnnnnnnnnnnnnnnnnnnnnnnnnnnnnnnnnnnnnnnnnnnnnnnnnnnnnnnnnnnnnnnnnnnnnnnnnnnnnnnnnnnnnnnnnnnnnnnnnnnnnnnnnnnnnnnnnnnnnnnnnnnnnnnnnnnnnnnnnnnnnnnnnnnnnnnnnnnnnnnnnnnnnnnnnnnggggggggtccatgggcgggtcggttaggggagcttgatacactgctctgcacatgcacactctccctggacgacctctcaccagaacatcgacagcccgagaatgaatttccctatttagagcagatcacccgcatatacaatactgtattttatacggcgaatttcaataatggcagctccgagcccgagctgccaagcctaccgatccatcccccggaaaactattcttccggctgagagactggtagtcctccgtcgaagctgtttatttttatagaactattagttattggtgagtattagttactcacggtggacccgaagccacaaatgcgggattagggtacagagctttgtacacctttcgcactgtgcggggccaacagctcggcgagactcgtaaaaaactcgggtcagacctgagatgccaacgtgaaatagaggctagagtcctaacgccagaatacgagcgcggtggagatgatcatatgtgctacataagtcaacataagtactaattaggtaactagaatttttatccgtggactcgagtgtctcccgagctagaacccgcgcttggccaaccgctcctacttcctttacagagaagctcgattacttacggagtatctatgtgaaggatgcaatcgctaaagccccatggaatttacagattaaattgcataacgtacggagtactccgaggccagatcagccaataatcgactgtatgctctatccagctattgtttccgattgattccagtgaaatgatgaagacacacaaattcgcactccagacggtattttctgaatttctttttttttctcaactgtggatgtccaacgcagcgtctagcccgtccatttccccccctgttgcatatatcaccaaaaacatccccttatgacggcgtggctttatgctagtcaatctgatcttggggtgatttaagtggataaggcgttcgagtacttacgctgtttgtgttgtcttgaacgctcactagcctcatacgtcagactagtactttactacttttagaaacggatgcacggattccgtgctttagcttcaataacttaaattgagagctcgagtaaggtacagggtacatacgggtaacggtggacgttgttcttaatgcacatggtaaatatacttacagcacgtgctccactgatcattcaagtgcgaatcgagccatattacaggtgggtaggctttccagcaatggcatgtatggactagtattgttttgacgtggtatgtggctgtatgcaaccccacaccagactttacattccataccacctcagtatgtatggatcaaccagctaccttggccatgatgaaccatgttggcatggaaatgggtttaaacttggaatatatagttgacatggtcgctatcgttctggcgcacggtgtgcagagtccctcgtcaacggacccgtgtctatgagccgcgggagaccgatgaaatcatcagcaatatttttttgggattttttgggaagcaccaggagattggattgatagatctccgggcccagtcagttgattccggtggaaaaatgtatatcaaccgaacaatatcagtttgagtgtagatccggtcgggccggccacctatcatagttaaccgctagagattaatagttccacattcctcgttcgcggctgatgtactttgtatgttgtatgctggtatgaggtcaagattcagattggatagatgtggctgtagtgttagatgaatgacggttataagattttaccaaaggaccaaagtacgtatgacctgaatggtatgcataactctattttactgctaccacaacaacatacttatttgccatccaagcaagttacattacctaataagaacgggagatacttctagggttccctccctagagtatccgtggatctgaatcgtcttacaaggacctccatactacgtgttgctaatatatgtatgctgaacacgggggttatatattaggaaggggctatgtctcatatagtactccgtatagacaaccgtatgaatctgaaatatccatgttagaatagaaaggagaacagatgctctgtatataactagtatatatatataataactccatactccgtacgttgaatctacctactccgtacctagtgatatatattgtcatacggagtactcgaaatataatacacacccgtacaatacgtaaatttgcacttcggtctcgctccaatgtcgttttccccactatgtccgcacggctctccggtaactgccaaaggtctccataatgtatttcgctcgaccaatcattttattcgaacaaatatattgtccaatttctttagcagttcgactcttccaggagatttcaaaaaaaaaaagagaagaaaaataaaataaaataaaaaagcctcttaccagaagtggccccctggtcttatcagtttctcccaggtggcgacagctttcctctctctctcctaaaatcttccgagcacatccaatggtttctcctttgtgttaagtccactgtggctcagtggatgacagtttggtgggatctcttatacatctgtcattggagggcctcattgaccgtaccatctttactcttcctttccccatcatcccctcccttagagcattatcccctccttccacccctcgtctctccaataatacatcatttcctccaatctcctataagaaggaaacatagtccattccaaaattggtttggatcggcctacactctatctgccttcacccttttgatctagtcccgcgatcttccgtttctggcgtatttcatttccacacccatctagtcttttcacattcacatcagagaaaattccctagaaccccttgttgcacttcgcacaatctcgaattacctcgaattacctcgaattacctcgaattatccacgacgtacgacctcatccgaacgctttccgaactcgatcaatccacgtcgtgaaaccgaagaccagctgagcacaaccatactggcaggccacaatttacgggtggccataatctgtttcttgccttcactatccaagccaggcgaagcattgataaattaaataatgttcaccaaccggtgagtttgtcgccgcttaacttggtcaatcgtataatggtctgttctaacgttcaagttcgcgcaacaggaacaacacccagaagccggatggtgagttcatcagtcgcttccagcagacattctcagacattgtccctcggcgggacagcacgagtccgcgcaatgtgagggcaggtgaacctttgatggcagggtatgtacattatattctaccaggtaaaatgtccgaggtcagaaactgacattcttgcatagactggccgagaataacgatgtgaaaatggagggtcatgatgtcaagcttcccatcactaacaacgaccgcactccccgaaatatgcatgaacttggcttgacgccctcatggatggaatccgcttcctattcaatgatgcctcttgccaacccgcattcgggcttttatactccaacctcttctggaatgggtgccatgttccataatcaagcgggcgatttgcataccccaacggggatgcacttgatgaccccgttggcgggcatgccggctgtacacaatcaccacagcactggcttcgagcccttccatccgcagttcatgaattcagtgcatggcatgaacccgtacacacagccatcatatgcgccaagcgcattcatgcaccgcgacaccggatatgatgtcatggatgatactctcgatgactcttctttaaatgatgtacgtgttgaaacagcatccaatgtaaccgcctctacggaattttcctctcaattggctggtgacatgtcatatgccaagggcgaaaagtgagtttaatgatccaaatagtaaatgtccgttcaatcctaaccaggttcgcactcatagattccgcttcaatgtttctctacgagcaccgaccgccatggtgaagactctaagtgaaattcccgtgacctatctcaataaaggccaagcctacaatctctcagttgtcgatacaagcccaccaatgctcagccacgaaccggtccgatacagaacattcatccgaatttccttcgaagagcgagaacaacgggcgagaccgtcagcatgttggcaactatggaaggaaggccgtggtaccacagaagcccatcaacggggcgggaaattattggcagttgaatacgtggatccattacaagggggcagtgacgcacacaggaatcgacaggttcaagtcgagagtatgtcagttgacggcttctgcgtcacttggactgccaacccagcgaccggcatatcagattgcaatattcccgtgcggttcaatttcctttccacggatttcagccactcaaaaggcgtcaagggaattcctgttagactgtgcgctaaaaccgagctgttgtccccggacgaggagaccggtctctcgcacgatccagagctgtcttactgcaaagtcaaacttttccgggatcatggtgcggagcggaagctgtcgaacgacgtcgcgcatgttaagaagaccattgataagcttaaacagcaagtctcccaggcagaaatgggtggtggattttcgaagcgcaaacggggaagtaatttctcgggcacctccaagggatcggataattcattgaagccttcgggccacaagcgaacttggtcgatggactcggaaaatacttcagagaaagtttccttggaggacgaccttcaagccaagttgtctacgatgcaagagatgttctcatctactcgctcagtgagcgttttcggtttacgcggtgacaacttcgacgatccggacctatatccgatccacttatcaggtgatagcgattcctctcagtatgggaatacaagtcgttcaagcacacgtgaattagagtctatcatgccttcgccgccgaacaccaatacctcttcttcgaattcgccgcctacccaggcactcagattaggaaaatgccccaccactatccagagggttccttccggcgaccaaatctcaaggggtttcatagaggccatcggtgtagacttgacctaccgacctccgtcggaacaccctctcaagccaagtgagtttctcgcgcgcaacccgtcaatattttcgctaattttcttcgcagttgcatgcttctatgttcgattcactggaaatgtgacgcgctcagaggattactaccgtgcaatctatttgacagaacgcaccgttcgagacctcgtgaagcaaatcaccgagaaatatcacatcgatccgatgcggatctcaaatatcatgcatgcccatgagaagggcctgcgagtcatagtcgatgacgatgtggtccgccagcttccagagggtcaagacatgatcgtcgacatatccgaagcacccggcggtgtttctggcacacccgaatctcctatggagatcaacttaacctattaaaactgcgtcacctacatctcaagcacatgccccggcatctcaaactcgaatatgatgcaaaagtaaaatcttcttttcacatctcacctcgctagccactgtggtctcttcactctggtctgccgcacgaactttccacattgagtgcattcttgcactcatctttgtcgtttcgtgttttcatcttctctaatgggtcggtactttttttcttctgggcgctgaacacggggataataaacgagtctccgagcaacgataccctgttatattatgtttttttgtttttgacatcgttgtgttgaagcttagcgttgcttacccactacgacggtatatgagtcgatgggctatggaactcttgatatatttgtcttttatggttatcatttcgatctggtcgagggccgagcatacgacgttgataccctgtttacctcttttatttccaggtcttctcgtttgatattagccatttttttctttttcttttttcttttctttttgttggttgctggtctgtaccggtcttgagcgttttgactttttctgtgatgtctatctctacccatgtcttatgtcttatgcatatatcattcgatatagatagtctcctgagggactactgaggatgggactgcaagtcagccactcggatgcaagtgctagaatacgatgaccttgctacctcaatttgatcttccatgtaggagtcgtactttgtcctaccttgaacactaggtgtctgagttgttaaactctttaacaactacaccagcaaagctgcagcagccactcaacccctggtaccttggaagactacaaccacatttggtgaccagcactcggtactgaaagttgccaccttaaccgagaatgagaaatatctaacgcttacatagccaccaccttccccccttccaaagtgggccatgcaatcaaaaaagaaacagactaacgcctcacggcccacaagtgattccacaccaacccagtggaacacgcactgtggctttcccattccaagccataaaaaggtaaacaaaatactacccccttccccggttcccaggaacctgggaactatcccacggctggtgaggtcatacctagttttggcagggaagatcgcctggaccgctgtttcgggtcgacataacatcactgattggatgggtcatctcccgtccggttcctgtcagccaaccaatagcccaggtggcggacggggccgggagtcgtccctgggaattgtaatttcggtacaacatagtaactccaaatcgggagttgcatcgaaatttccagatcgagaatacacaccccacgcttggatcgtatggtacgtatgtttgtcgtgctttgaccttttcatgagtagcactagttaggaaatcggaagcggaactggagcaaaaagacgtcacgtacaactctaattgtgtcaagcttatctaatcttaagcgcgaagtctaactatgtaattaatgctgaagcattcctttcaagactagctttgagaggctatatttcattgccctttgcggttgacgtcttctgataacacggttactttcactctgtgttgaggacccgcaaacacggttgtattatccgtggctcctatctctttcccaaatactaccttgaaataagcgagattgatttcccactatcactgacgctgtacggggtacggggtacaagtgtgcatgagagtctgagcgcctgccgtcataatagtctgagcgcttgcaatgctgtggatagctgcagatgctgaatatcacttcctaaagtagagaggtaatcggcgttttgtctgtaatgattggcctgcgcaacaacgatatagttgcgatggaggcttatgatgtagtgaggggtgaattaactttggtggcaacagagtggaggtggtctacggtgtagtacatccggtagccgaattaggccgtatatcaaattaaccttggaaccattattatttattacgtatgtaaattacagacccgccaaccagaccctggcacttttacttcaactaccgtttactattttggaccctcttatgatttcctattttaaccacacgctcacctatatagctgcagggcttgatgggcttcatttgttgttgaggtgcaaatggtaggttatttaggaatgaagagtgcttctgtttagagtatcatgctagcctgtcacttgctgccacttagattccaggacgatggatggacggataagaagcctgacaggattaggaacttccccccagtggaagatgtggtatcaatgcgcttctgtaaggcctcggaatacgcttgcatagcttagacttccagtctcactgacggagttgacttcagcaaaccatctttgcggatatgacagcgttattgaacgtacgtagatgcatctcataggtgatcatattgcctaaacaacattgggcactctagttatattgctgctttcttcggagaatgatacagcgagaagaacttgtctttgcttctccgtgcaataagtagattccaccgtgcactggagtcatcgctgtttgatatgtcttcccttgtagcaaagaaatgttccaaaaatacatagtatcctcagacaatgcatttaaagagctagcctgagcagatatttcatgattgaattaatcagtagttcaatacccaggcgacacacctccattgagcatcatctgggcgcagtcctggtgctcaagtccatccaccgggtaagagtgaggcttgcatgattttcatccagggttcgtatctccaacttccaagagattacatttatcacaactcccttggtcggcttgtttcggtatgcttgtgctagagcaataacactcaatttgagaggtgaagatgtcgataaagcccaggtcactaatcatgggcccattttcgcggtacgtgttactacggctctttcatgcgttcacaagcacaggcccggagacatggagcaaattcgagcttcagcagaatattgtcatcataacatctttcgggggatctttttctgatgttttgttgacgagggattgtaaccagggcggggctcaggatcagattcgaccagctcctatctccgtatagagcaatgactgaacggggattccgaaaccggtccttagtaaaaccctctcatcacaagctgaagattgaacgaaatggaaaggtagaggtctttgaaggtaccgatatttcagattagtagagtgacttggtagcttagtgcttttccacaaataaagtcggaggcagatgaagcagagatggtattgcggtaggtcgtaagaaagccgaaatagcagcttgatatctgcgtcatttccggtgcggccgttcgagaagttccaaaaatcaatcctagcaaaaggaatacagcagatgatgattgcctaatatcagacaagcaaggtcgactggtgataagtgctcagagatcatctataatagctagaaggtcggtcaaggctggtggctttcgcgtggccatcctgttgcgaaaggtatcccctgtgcccctggctgacttttgcttcacttgttatctgacgtgtcagactgaacggcttagtcgtaggcagcttccatggcctttgaagtatcatccgaatttcttgaccttgtaatccggatagttagttaactaattcccaagcgagctgcgcagcgcagaacacatagtaaaatcggtaaattataatgtggtattttaacaaccaacgcttttgtttaatttcattactgtccgatagcaattgataagcattgggctagaaggaaaagctcatatagataaccgttgttgagatatcatgttgtaatctatcgcttttactatgtgttctgcgctgcgcagctcgcttgggtgcgcagctcgcttgggaattacgttagttacattgggtgattgcttactaactggaagtacgatccatttgagtaatcacacctcggacctcgggagcaggaccctaagcggcggcaccccgatcgggaaactgacatccgtggtcaattgctatagatatccaaaattcatggctatagatttcacaattctagcattttaaactacttctacttggactcttgaggcacactttgatacacagcacaagccatatgatgtcataatgcgtcagttcctcagaagtggggctgaaataaattatttccactttcaatttttgtctgcgcgggtcgtcccgctacgtgaccgcgtcgggtctagggtggttctggttacataccgcacatttcccgggtattttgaaatacgtaacgtctgtatctgtttacactagtattttttagaatacaattatacaacgttggagtttgccactctgctctgactgatgggatatctcccggctgggactctgattggaacctatgcttatactagcgggtagtagcgggtgtttaacagtatagacgttgcacttaatctgaatgtcatctttctcatagtcaaccttgacattatatgtgataatcatgccctatgtcgtgtcaccattgcccctgacttgatctgccctgacaatatagcatcgatcgtccttggcactggtatagggctgttctcggtcaaaatagaaccccattgtagatttacgaataatcgacaactttcgaggctcaagtgatatcccacttcggtacttgaccttctcgcagtgtctgacctaaatctaggttgtcatgccaatgataatcgttacttcaaagatattaaaagccaatatccctgcaatgttttactacattgtcctctatttaaacttaattcgggatctctatggccataataaccacaataaaaagcagagctatacctgtttacctttgcagttctgttaaggtggcacatcgaccattgtctgtgaaacaccaacctcttgatagaaatagttctgttcttccgagagtagtagagggctggttttgagttgatccccggatatcaggtcttttactacagtctacggcatgaccctgctgaatgaaaccccccgatgttaagtaaacggcctttgtttgcatccaatttagtatatgaactaaattcagactgtctcacttaggttgtacaccgatggttgccggtacacctagtttaaggttctattcgagtcacacatggaggtgtagtgtccaaattatatcccaggagtggtgccttccagggttgtcaagtagctcactatagccgtaaacggcagtcgtgacttccttgtatgtttgccctaaatatggacagcacgtgttccccccgttccttcctgaacagctggggactttgtttactatttcttcctccagtttcctctttcttttctcctctgttctctcctcttccactttacgttcgttccccttgttcctcaattgaccctcgattgcttggttgttccatcaagtgatcacttcacattcgtttatcaacctccatattcgccaagatggtagcttggatgcgtttcaagttgcttctggctatggtcaccgctctggtgactatggctgctgcttcggctggtaattatcatggctgataattactctatgatcacttactgaccttgttgcaacagaatgccaatacatcgagacggtctttcttcaggacccccacactggggagcagtatcagtttggtgaaggcaagtcaaacctgctatctgggcttgcctagaaatatgccgttactgatcgattttcacagtcaacgttctgcctcgggccttgtttggtcgtgctattcaagcttctgaactgagtaaatccaggctcttgccatcctcgcctcttttctagaccaaaaactaacttggtactagtcactgtcacggttacccataccacctgcgatcctgatgaatcgaccacaactgtcaccacagatgttccttgtacgactgtccagtctaccacacttctcaccacggagattactccagtccccgctcaaagtacccctgctcctggtgttcctcagtctactgtgcctaccacctcgtcaactccggtgcctgttaacactcagacttccgtgcctattgtccctagcgctacaagggtgacaaccaagtcttctgcacctggcaccactttggtgacctcgcagtcttcattacccgggaccgctcagaccccagtgcccagtactaccaaggtgcccattggaagcagccctgtaacaaaccctggatcctccacggttactgccactaccactgagtcggtttcttcttccagtcctaatgctaccagcttggctcctatccctgtcactaccgagatccctggaactactgggtccattacatccactcgtcctaccaatgtggttcctatccctggtactactggaattgcttacacaaactcaactgttcctcaggctcccaggacggtgactgatgtgaccaccttttacactacgtcttcttgcctcaactcaactgagctggcccctgctccggtgaccactgaaatcaccattaccgttgaagttccttgcaccgagaccaccaagtgtgtcagcaccaaggtccttaccaccggcaccctgccggccttgaacacaaccgttcctgcttccatcccacggaccactacgaccaccgagattcagtcgaccatttctgtccctgtcccgattaccactgaggaggtcactggcacggtcgagatcccttgtaccgggaccaccaaatgcaccagtactaaggtgtacaccaccatccctacggagactaccactatctctgtgactccagtcccgattacagctccacagcccaccactgaggtggtgactatggtccagccgactgttcctggtgcccctgcaaaggagaccaccgaggttgtgactactgtgattcagcccactgctcctgctcccgtttcgcagggcaccaccgagcttgtgaccactgtgaaccagccctctgttcctgctcctgttccccagacttctactcacgaggtgactaccgagatcaagccgactgacttggtcccacttccgcacgccaccactgtcgaggctacttctctggtcaaggttcctgctccttctacgcagccggctaccacccaagagaccaccgaaaatcaaccagtcgctgcggccccgaccactctagctacttctactgtctctaagcctgaggttgagagtaccacaaccgagtccaagatttcggttgtgtctccccaacagcctactcacacccaggaggatactgtcctcccatctcctcatggcacttcttccagtggtactcactccgcttcccctgttttcaacggtgccaatgccgctgcaatcatggacagccgtgtctttgccatgagcattgtgattatgctctctcacatctttcgcttgattctgtgagaacgacatacactcttaccgtgtgacgaggcaagtccagccatcttctgatgtagcaaggatagtatctgatgcgatgactgtgttcgtgatggaatttgaggaacccatggtgttgatgggtggtcgtgtgtttttatgggatgcaactggctccccttaatcttgcaaattttatcagtcactcatattctagttgaagcatagctttcctaatctcacaaatgttcaccatggttgtgtctaatgataaagaaagtatcctgtagtctgtaatctgcaaccgaatggcaactccaagggacaacatagctgaccgaacagtattcgggcagttatatttcggctgtgaaataatcacaatgtacagaacgtaatacgtatgctgtgagcatcaaagcattgaacataacacatctttatcaataaacaacggccagtgtgataacctcacagaatggatgaatgcctaatatccccaaatggggatagtagcttggctaaagccagggtatctcagagaaacaaggagaatgcataggtatgtgcacatggagtatacacacaggacagacgtgaatgggtacagatgtccctaccccagtagagttcaaacctcaacctcaccaccaagagattcaatgtctcgcgtcagagcacaaatccgacatccatcgccaatcttgtcccgcaggattcttgccgtcgtgaccttggggccaacactgcgagatgcagtggcagaccgggtctcgtcgactggagacatggcccggggtgtaagatcagcagatcggtcacggctgtttgcgccggattgttgtggcgtgtctgagtgcaagtgggatagatggaaaatgtggccacaagcaaagccaacgagaatttctcgctctgtatgggggttcttatcagcattgtctttttggatgaaaggagttggggtcaaaatcataccgttttcccggaaggcggctttgcagcnnnnnnnnnnnnnnnnnnnnnnnnnnnnnnnnnnnnnnnnnnnnnnnnnnnnnnnnnnnnnnnnnnnnnnnnnnnnnnnnnnnnnnnnnnnnnnnnnnnnnnnnnnnnnnnnnnnnnnnnnnnnnnnnnnnnnnnnnnnnnnnnnnnnnnnnnnnnnnnnnnnnnnnnccgggagggggtttttgcgcccgccacatcttccctgtccagggcctccgaattttctcgcaccattggtttcagatatatgatcttgagctggggcattcattgtcgttgccttcttggaatcttcctcgccaacctcggtgacatcaaacttgattccccgccgctgacctttgcgcagcgagtccatcccaagtgcaacttcgctttgcataaccctagccgcgccttgactgatactagcctgcagatcatgctcacggatcaagcgggtgaggccctctcttagaccttcaatctctagcccgctcgggatacgacgcacaagctttatcgggtcgatggccgtcccggcctcaacgagaagaccatggatgaactttggcttgtccatggagtagtcaagcagatcctcccacagatcaggatcgtcctgtgattttgcaaatgaaatggcctgtgaaacatccttgagatccgatagaatcaggttcaaggctcgctttgtctggcccatcttggacaagagaaaaatcaactctggcgtgaatctgtggttttcgcagatcgatgtggctttctcgaacgaataggatatgcttgtttggaggaactccatcagtagaggtcggtcgtagtcggcaaatacctcaacagccgtatcagcaaagttatcaatcagggctttgccttcatcagcagcaagcttgctggctgcatcccgagcatgcgttccacgtcctcttctgggtttatgagcgtcctgcggtaatgattcacctcgccagagcgcacggagatagaaataaaggaacaggaaccggtccgcggcgaccaactgtgataccacggtatctggaggaacaatgcccgtgtatgcttcccttacgaggagtcgcgtgggctcagaagtcagctcctccagttcgaattttgtggcggacttcatttgctctttggaaacgcgaatcatgatgaaggccggtatatcatcagagactgcgtcgagcaatcggtgttcccgaaccaaagacatcgcagcatctccatcttgcaatcgaatgtagcaacgcaaggcttcgcggtaatgccctcctgctaggaacaacttggcgaggcaatctgtgaggattcgccattcctcagaaccggcgcgtaccgatccggatttcagctgtgcttcgatggattccgtgatcacattcgcatcaaacaaatcggatggccatgttccgaccagttctttgaatttgaccaaatctcgtgacacgtagtgagtgagaatgacttcgtagatctgacaagacaacgatggatgtaaatcgactggaatttttggagttatctcatcaattttatcctttttgataaagacccacgcccagtgttcccattgtgaggcattgcgaatgactttgccacaaatactcgcagcatgaatccacttctcttcgctgacaagttggttgatccagagttccccaaggcgagctttttcttgttcggcagccgaaacttttcttctaccagcggtcgtcatggatgatcgatcatcagcgaagaagtcacctaaactagtttgcgaccttgcagcctcggacataacgtcggctaagtcaggtattgagcctgcagcttcgggatgttcatcgacgagacgccatgcgtcctcgtactggccatgagaatcaagccaggacaaacggtccgcaagatcccgttttactgcaacaacacagtcatatgggctgtggacaaagattttggcaccaggagcacctgaaacttcctgtacctccttcggaaggggctcctcagtcgcgtagattttggacatgaaagagggagcaaatctaccagatcccttgtccccactacttgtggtactgcggatactggcgccggagctgaaaagccgcgcagagtacatagtagcatccaaaatcccatgcccaagagccccgagggcaccgcgctggacgacctgtccctctggggtcttccacggaggcaagacacttagatgataatcagatgccgagagaccctcaaagcggtttactgaaagcgtatcagcgctaatttcttccttggtctcaatgtcaatgacacgaagttcaggttccaggcccttttttcgattgcgggtcccactgcctcctccattacttgcagtttcgccttcggtctccaaatatgcaagaatgacaagaagacgaggcgtatacaatgagatgccagataccacgcagtctgttcgtaatctgtgttcaaagttagcgatgaacgatacaatctgtgagagttccagctcacattgtaacaacctctgcagagcccaatttctctcccttggatgttttgcttgccctttcggggtagacatcaatgacccaaacagttcctccccacccgacgacaagcttttccactttctcagtgggcaccgtcgactgtacctctggacttgctggacagtcatttggatcgagatggtcccgaatgtccagagcggactggtcgatccattcagcacgtgccttccaaacattggccatttcgtcccagccgggacgatttggacgatcaatatggctgattcgtttccaggcaaattctgtctctgaagaatctagatgtaaatttgaccgcataatcttaatgccttcctcgttgacccaggccacgtaatttcctgacaatgaccatttaattgtgcttatagtcccttcgccgctgtggataatcgtgtcttttccactagtggctgctaggcccatggatccaagccaacttgacgccgttgcggctgcaccccccattgttgtagaattggaggtcgccccaatacgaccaccagttgtcaagaccaattcacctgctcggccaccagacaggaatgcccggtcattcttgtattcgggagacaaagcaatagactggactgggcggccaaaattacgcaatagcacatccttcgggtctactagcgatgagacgcacacgtggccatcgattgaggaggtcccgatgtaaatcgagttcgatggtagagggaggacggtcgaatgattacccagttttccttggccacggatactgccagtgaatgttgatgctcgcgttggtggtctgtattcttctgcagtctgcttgctgaagagctcttgcttgaagttcggaaggggaggcggacatggcgatatcgatattgaggtgacactggctgagtgtgcatgatatacacggacggattgtagaagcggtaaggacataacatgcttgacaaggtcagctcatatgtctgcgcgctggtgtggctaacttacgacgtttccgttgtgcgtcccgacgatctaggtacctcgttagctcattatagtataggtcccgctaaggatgcataccattttatcccctgctacgaggaacgagcttgtcgcatccccgttgcgatatactgatcccaggtgcttcgtaaggtatgcgtacttgaggcggggttcctcgtcctcgtcgtccgagtcatcctctccttcggcctcttcttcctcggcctcctcttcttctccatcatcgctgctgctagagctgtggtcattgaatcgttgctgtctatcttgggcgccttgagtcgtgtctgtaggtgatccggttcgtatggatgtgtcgtgcttgggagtgctctgaatggcactttcgtccggcggtgtcgcgccaggcgcgtccatggcaaatccctctcacacctgcagctcccaagctggttgaagtggaatgcgacaagctgaaacgggatcctgtggttctacagttgagccggggtaggtcagtgccccgagcttgattccatgactaagcgggctattgggccgcgggcttcaggacgatgtcatcgaccgagctattcgggctttttgatcctcggatacacacacacatacaatgtttgccaggccatatgtatgtttaaactgttgcaggcgcccaatttcacagtttcctacgcgaccgcagacccaattccttcatgcctctcctagactagcacttccccgacggaaggatttcttttcatccaatgcccacttgaaacaaaaacagaacgccgatgaaccaattgaatcctctccggattcccggaagcaacttcgacggggtcctaggtcaccagcagctcccacttcattgcggcgggtagcggtagaggcacagaggtcgaaggatggcattatctccaaggcgctcctcaaagagcaggggttatatcggactaaggtaggcatgactgtttcttctacgatcttcttccactaattatttatcgctagacagttaccgcctacgccgtcgccgaacaatttgacatccgcaaagtaagagatatcttgcaagaacgaggatatgaaccggacccgttggaaaccgggcttttcccgcaggtcgttcatgttcagatacccttagactccatacagcgcatgacgaatccctccggcatagatccaccatccgacgaagtgggcgatttattcgtgtttccctccggtactgtggtagcgtgggggctcccagaaggattcacatcattcctggcaacgcggactctcttgcccgcagcacaaggtgcccatgtggataacctggaaaccgaggatctcgaattcgtggaggacccgaagcgagagaacagtgtgatcaaaggtgacacgattatactaggcaccaaaccaggtcacggagatgcggagggattaccagcggcgcaacaatccattaacacggtgttgaccaagattgcattttcgtcaggtctcgctcggagtacgaagttggccgtcctcgagagccttctttcaaactattttgaatcgactcggccaattccgactcttctatcaaagggatcccgtcttccttttacacgagactttgtcctccggaagacggggcagctgctcagtgtccgagcccagctcaatctctattccgagctcactgattcccttcccgatctcttttgggacagccgacacgagctcggcttggagggatactacgagcaggctggcagagctttagatgttggaattcgcatcaaactgctgaacgagaagatggactatgcgcaagagatcgcaagtgtacttcgggagcgcctaagtgagacacacggtctgcggctcgaatggattattattctgctcattaccgttgaggttggctttgaagtattacgactgtggaaagaaagagcacataaacaggaggaggcgcgcaagcaggaggcctaggtcacccgaggccagaattgacaggcgcgaactcagtgtgattatattgcccgcgataccccttcattttcaatattagacgagtgcaacataagagaaaatgctgctgtcggcaagtaatcaaagccaggtgactcgtgggccgattccccttatcagcccggctgtccccgcgcttagtcatatgagactccgcacgaggacagtacccgtagacgccgacaaccattgtagcctccttaacatacctatccctcgtctaaatacgattttcctagtacacacctacttgtctattcttatattcttcctctgtttcaattcgacacgtttgttccctgaaataacggcaaaatgataccagcgatgatgcggggatcatcacaacagctcatggggattcccggaccccagaagattctcaagaccgtcggctcactctggctttcgcaaactacaaatgagaatgataatctcagaacttcatcatcatgccctctctcggaaattagttgccaggccaatttccacggtcaagacacctgctgtttcaattaccccggtggtcaaatgctgcagacgcaattctgggatgtcgatcctccactcggtcctgaagacgcatggactatccatggactatggtgagtctatatcatatccccaggttgaatgatatcaagctaactcttcaggcccgatcactgcaacggcggctttgaccaattctgcgactccaaacgcaagtacagcaacatttctctgattatagtggacgcgggccggggagacttgcttgaatacatgagcgagtattggaaggatttccggggggatgataacaatctgtggcaacatgagtggaacaagcacggcacttgcgtcagcaccctggaaccagattgctacgaggactatctgcctcaacaggatgtcgtggactacttcgacaagactgttgaggtttataaggagttgccttcctatgaggttagtttaatcctgtcggttaatgaccgactatattcggatcaaaccactaaccatgcgtaagttcctggccaatgctggcatcataccatctcaaacacagacctatgctcttgccgatattgaagctgcactagaacaagcccatggagacccggtcactatccgttgccgaaatggtgccatcaatgagatttggtactatttcaatattgcaggaagtctccaatcaggggaattcatccctgctggaccaggtcggtcaaacttcaaactcgcgttggtaaatcgcaagcttacaaaatagtcagatggccagaagtccaattgcccttccaggggaatcaagtacccactgaagcatgctcggccggagccgacccggacgacgaccataggtaatccagagcccacggcgccaggaactccatttgcaggccgaggtaacttgattgttgagaggcttaaccgaaagcatggctgtatcattagcttcggaacttggttttcttcagggacctgtgcgactttccgggccgaaaagctatcaggttcgtgaccgtgctttccacacatgacgcctctgctattgtttgctaacgtgaagtatccttcaggtgatttatttactctgaattctagcaaggggccctgtgccttcgagcgagacgcccttacttgcggaccacacgtcaacaagcccagtgagttcaccgtatgttcatcccagaaaatgctccaatatatcatctcatcttctcacactgcatacaggccaaggatggtaaactcgcctacagtgatcacactactttctatgcccaaaatcctcccaaggggcgtacacaaagtaatgtgtatgcttcgcaagggggacgacccattgaaattgagattacctgggtctcgaagtagatgggttatctttactgttgtttcactcgctaccctggtgaaacataggtcggcctttcggtgtgatgttgcacagaaatccctgcatagaatggaacgaggggactgttagacgattcctcaacgcagaataattagaaatatcaaatagaaagcgcggtgtttggagtagtatgttaatatatgtcattccttgcgtgaacggatattttgtattccgaaacttgagggtgcaatcggttgattgagggaaggtcgctaagatgcagactatttgtacttttctcttggaatctattatattccagtcttcttttcacctacaattctacgatcaaggctgtgacgggttatgtggagccagatgtaagctgtaggcatagcatgtttgagatggtagagtacaagccatccgcaattatgtctgtcatcgaaggaaaacagtccttgaacaagccatccttgacagggtaggtacagaagagattcattgaaaataaagacatcaaatacatatcgcatcatgaagtgagtgaacatatgaaaagaaggataaacacctggaataaacacgctgccgtgtatcgaacatcttcgaagagatgagataaggccgaaagaacgtgaataaaaacaatcatgacaagacaaaaagaaaaaaaaaaaaaaaacagcaacaagaagagacaaatacatggggggaaataaggggcaaaaagcaaatagcccgaaacactcgcaagtccgcaaagtcgtttcaagtcccgaaatgtgtgcagagaaagaaaacgcccttttttatcgtgggtcattaaagtgtacaaggtcgtcccggatcgtcgcaaagcagtgtcgccgtgaagaagatggtaagccacgccgtatgtgtcgtcgctctttttgtagtaacatagccgctcaagggtccactaggaactcgctggacaagcagtcgattgggtccgtcaggtcatcaataccagagaaggtcttctcgggataatatgacgagacaggggcgaagtcggttgcatcgacgaattgataagtcgggaaaccagggatgcccgagtgagcgagatgaccgaactcctgtcgcaagtcctcggagggatcttgggtcatgaagatatcgatctccgagctgacggatgattcggccagagtgggcgccgaccgaggggaagacatctcccgaggcgagagggcagattcactatagagagattcctgcgagtacgtggattcctgcgagtatgtctgcgagctgaaattcgatgcgtactgagccattgcctgttcgtatctagcgtgggcgagttgaggtggtgacaagggcagcatgtcatcctcgagccgggcattcacggggttgtaggtgtggcatggcggggacattgtgtggtatctgtctccgggagaggtgggcggcgtataggatgagacggcactggatggggcatagttgggcgagttgaacacgggagcatcttgcagagtggcatgggtctgggctgaaccgtttgaggtggatttttcagcaacacgttgacgagtacgagtggacttggcctggcgagtatcgagatccggacggctgttcttcttcttcggggggcgaccgcgcttggtggtctttggaactacaccggtgaagcctccaacacacatatcgcgctggcggtgccgagttagggcatcctgtcgagcaaagctggcgccacaggcacaggcgaagggcttattgccactgtgtgtcttgagatggcgcttgagatcgtgtccgcgcacaaagtgcttttcgcaaatgtcgcatttgaattgacggtctccgaggtgtgtttggacgtgggacttgatgttttccttgcgaccaaagcggcaaaggcagcctgtaaatagacagacccactttccatctttggggtcggggccggagatgaacttggcaatctcgtcagtcgaaacgccggtttcctggactgaggccttgactcgggcgtcaaggtcatcatcgtgagcggctagctcgatgggagacgacacagtagacggggcacgttttttggttctgccagtggaagatgtgattgagatattggaattttgaggcgtcattccatatgaactcggggatggcatatcggcaatttcggcgaacgtgctaatcggggaattgaccggagagggcatttgctgcttaatctgcacagaattgacataggctccttgaaaagactgcgctctctgcatctcagcagtagcggggttatgggggaatgagaaactttgggacttggaaggtgttgggacattgctgtacatggaataatcaatagatcttttcaatggggtagaatcgggggtcaagggggagtctggcatataatcagtttcggtcgggtcaaattcaacataaagattcatacaagcagtagacatttgcgaaagaattttcgcagatggagcctttggttgaacagagactgggtgcattggtccggcataggccgtcacctgctcgttttggatgattggcatgttgcgccgagagtacaattcccaatcggcattgccgacatattgttgctgttgttggttcgagaattgctcttgttgcatacggtgcagcgcacgcttcaatggtgtattttcggagctctcactggctgatcgggacaaggccggagcaccgatggacgagggcgcagggctgccagtggtggtgtggatcgcttgcaattgttcttggttgaaagcctggcagtcagacccgagcgactgttgttgatattgatatggctgctgcatgtgcatgccatgtgggatgaaagcctgctcgggctgctgggcataggattgatactgctgtacatccctcggttgatatgagaaacctgatttttcgttaaaataatctcgcaactgcgagaccgtcttcggcatgtgtcggtcgacattgggctgttgactgaaggagttgtagtccacagtctggcctcgacgatgtgaccgatggggttgcatattggtcatgactggttggtatggagcaactggggtggagatttgacggcggtgacgaccggttcccagcgcgttggagttcatgattatattgccgcttgacggttgggtcctgattgaggtgtcagtatgtgaatatgaacgcaatgggcactaggaagagggaaagtgggaggggtgttagaggctcaagagtatcaagtgtagagtcaacctattcaggtcacacggttcaagtagatattctcaattgaacctggaagagcagaaacacgaatgtatgaaggtttccaaggtttggttctggaaccccgatctatgtgagagacccgcggttctcatcaacaaattggggcgttggcatggcaacggcggtgtccgggcgtctgggaaaccaaaggctttgacgaaagtgggccaacccttgcccgacttcgattttcccgtggtgatcgaggaccttgcttgtgattattcgacttcttctgcaagggcagctagtccctgtgatagaatgcgtataaacgtacctagaatccgtaagattgacacctcctcggttcgtttccaaggagattcgatataaacaaggtgatctcgtactatatagaccttggctccatatatagtacccatagcccgatgggccgatatggtgccatggcgtcatccatggaaatgatattcgacctgtccaacacgggataattattaacgtagcgggcctcaggcagaaataatattcgagtcacgtgctttttctcggtcagcatttcatttcacgctagactactttcggtgcacgacccaccccacgtgatcgcacaacgattttaatcaccaaccggcttccgcgcacaacgatcttctttaatcttgcaaggttgaggaagacaccactgtcgaggtgagtatttggttttaggccagcggatacgaatgtgatgaccatgcgccattagcatgtagtccattctctctctgacttctacattttcgtcgtcgcgagcatcgcactgactttttttttttcgcaggccttcatcaagatgcagatcttcgtcaagaccctcacgggtaagactatcacccttgaggtggagtcatccgacaccattgacaatgtcaagtccaagatccagggtaagcatcgaaatccgcgcgcaacgatcgcacacaccacaacccgaggctctagactaaccccgcaccagacaaggagggtattccccctgaccaacaacgtttgatcttcgctggtaagcagctcgaggacggccgcactctttcggattacaacatccagaaggagtcgacccttcacctcgtgctccgcctgcgtggtggtggtaagaagcgcaagaagaaggtctacaccacccccaagaagatcaagcacaagcacaagaagaccaagctcgccatcctcaagtactacaaggttgacggtgatggaaagattgagcgtcttcgccgcgagtgccccgctcccgaggtatgtgatagctctgtcgcaaaacgattacccttatattctgattcggaaactaatttgtcctttcttatagtgtggtgccggtgtcttcatggccgctatgcacaaccgccagtactgtggtaagtgccacctcacctacgtcttcgacgaggccaaataaacggtctaagtcggaccgtggtgtgctgtcaccgagcttgggcgtggtttctgctaggctagggcaagtgacggagtgtcgcggttgacgctggttgatgatggttcttggaataccaatgtgctacagtcaattacaaacaaaaactaggcatccgccgaaaacttaaaaattccacgtaatgataagacttgtatgtattcgtagacttgggatattgtcatatcctgtccgatcaaccactatactgcgaacaacaatgcttaaatccgtgtaagccctcactcaacctactcttccgggaacccagcttggacattggcatacttgctctcggggaaatcaagagcattacacgactgatccaaagcgcctggaccacccacaccgtcaacaaagataccgatcaaacttccttgcgccggatcagcctccttcccacccttatcaccgctactctcccaccacataccaccacccagtccgcgctcgcgaatatagttcgccttgatctgcgccatatagggtgtgtcgtaagtaaccatcttgcgcgcaccggcatcatagcagaacgaggcaccaggttcctgatcaaactgctcctgagccccgggtctgggcagtgccttgtaatcccacaccccgttctcccagctgccctctccgacgccggagaagggggcgccgggtccgtcagtgttctcaaatgcacgtccgtacagcggcatgcccatgacgatgtttgagggtggtacgccgccgacgttgatgtagtagtctagggcagtgttgatggagaacggcgtggatgcagggttggaaactgaaggaacgatgttcgcttggtggccagcgttgctgtcccagcttccggcgaagtcgtatgccatgaggttgtagaagtctagcactggggtcatgtcttggaatctgagcttctcgtaattgctcgggcctgtagtagttagtttgatggttcagggcgcttttctatcgccgaggatatggtatagacataccggcagggcaggcgattgacaagtagaaacggcgatcgggaccggcctctctatcaagaacctatttccggtcagttgggccaatttctaagaaccagaataacgatatacctctcggcacttccgaagcagaagaactaggtgctcagcctcggtatcatctagatataaaataagcctcgtgcctccttcgagtatgttccgacaaacccacctttaggatattcccaatcaatatcaagacctaagaaacagtcaaaaccagcatttcacaccatactagtcgatgaaacataccatcgaatcccagatccagaaccaagcgtgtcgccgattcggcaaatgcagtccgaccctcatgggaactcgcaggctgcgcgaaattcgaggagtacgtccagcccccgatagaaagcaaaaccttcagcttgcggttctgcttcttgagcaggaaaagctgcttaacacatccgtacacattagtaccgacgtcattccacgagtctgtcgggtaatgcttctcgacgtcggaccaagagtcggtcaagtacctgcaattctgggtcagaaaatcttctgcagtctgtacggatcaaaatcaggacttacacttcgccactttcgggacggatgttggcaaatgcgtagaggatgtgtgtcagcttctccgcgggtagatcctgcgggttgtagttgcggccgtaaattgcctatgcagtatgtcaacattggagttcttttctgggttgtatatgcagccagttaggcatagtaaaatagatgcagaccatgcagtcggagttgaaatggtgaggccaagttaagtatagtacatacccagttgacaaaataggcgactgatctcatttcacacatggctgatgcgggatgggtagtacggggattaaagtattgcacgagaacagccacaagtagggcagtaaacagagcaatagacttgagatggtacgccacactttcaagtcaaaagaaagttaagagagtttcgggagcactaaaagcaagtatttcaagatacttcagttatgtcgcagcctaattgttagtggacttgtcgtatccttaaatctgggcagtgtcaacgccacaccctcattggtcaggactcactgggcacctgtggcggtgtatatattcaggcaccaaggcgacaaacgtggctgggtatagaagagataagaagatcgaagatcagtgagtatctgtatatctgtataagctggggaggacctatgtcggaggttatatacatatgtataggtactaaatgctcagaagggtccaagaaacgtggtgtgtgacacctccgcctgttcatcgtgcaatgtaaccatacttggccaatcctaatatgtctcatgtaatagtgtgttagcttattagatttggacctgcaactcattgtttagaagcacgaggtaggaagtatgaagtactcgtgatgttaagaatgcaactctccactctccagaatgcgacatggccatcagaaaagaagcaatactatgtagaatcaccattgactagtcatgaggactcgtttactagattcgtggttaagaagatcctgaatattctgaagttcgaagatctcctgattggaagtatctgtataaaaccctggtcaggcgacttacctcgaatatgcccacagcatcggattctttcggcagcagatcaactaacccttagtgagaggcttcccaagccgaggaatgtcggacaagcggcaatcccggatagtgatctcgacaggagatgtacaatgatcgactgaaactacacgtggagtcagccttgaacccacctgtctacatgtgatgaatgtatgtacaatacatatgttgcaagttaaaactgcatgaaacgcaagttctatatccacaaatataatattagatataactagcactcggaggcaccgaagttgatgtgcaacgatcgacaaagcatcttcatccaaccccaccgggcctgggagccataattgaatgccgatcaagacaaacaagagccgaagatacgaggctgtcccgggaagcgggggggggggacatctagaaagagaaatgtgattggcccgcccatnnnnnnnnnnnnnnnnnnnnnnnnnnnnnnnnnnnnnnnnnnnnnnnnnnnnnnnnnnnnnnnnnnnnnnnnnnnnnnnnnnnnnnnnnnnnnnnnnnnnnnnnnnnnnnnnnnnnnnnnnnagtaaggaagtggggggggggggggggggggggggacatctagaaagagaaatgtgattggcccgaccatagaaagttaacccaaaggaaaccccgggaataacaaagaaaagaagaaaagaagaaaacagaaaaaaaaaacaacggctgcaaatccaatccatccatagctgaactcgagccgcgatatggccgtttgtagagctgattggatcgacacaagccgaactaacgcccttagcctcgcaagccgtgtcggaaatctctacatcgtatgccaagttgatcccgatccactttgatcgtaacgcttttcttttaccctagatatacggtggatcgatttcagctggtatctctgcctcggagccccaggtgtctcgttcaaaataagcctctacgatgtgtcctttgtccttgcattagtacggagtatgtacctgaaagcaaattcgtctttgcatcagaccatgtggggcattggggcattggggcattagggctatcttctgttatgcacttcattcaagtatgtataacatccggagcagagtacttgtccatagtactacgtagtattacgatgtatgttgtccaatatacacataattagatctggtcttgtagattgaacaataaaatggaatggaatgaaattggattggattgagtcttcaaacagatctcatatcgcaaacagaaatacagcccaaaaaaaaaacaagaaggatatcgtagctataaccaaaaccacgcaagtaatccaaactcattttgttatttcacagaaaggcagtacacacggccagcgctatacccaccatcccacacaaacccctctattaaaagaatcatataacgcccaacaaggctcacaagcactcaaaaaaaaagtacaaggcaaaaaatccgaaaaaaaaaaaagaaatcccgcaacctcaacccccacgcaacatgcatttgttcctatttccaattttcatttccgtttcattactttacctacccgcaacccaacgatggatcacctccaaggacgggtcatcgtcaagccagtgaccagcgcgcagatccgcagctcgcaagtccgccacgacatgctggtctgtgaagcgcgccagatcctgatggagggcggcagttgcgctcttcaatgctgcagagtgctgggctgttggaggggagccgcgtagaacaccggcgcgcgtcatggcccatcgccgggctgcggcggcgcgcaggtagatcttatgtgcttggaatcggcgtgcgctgctgtccagtatgactctgaaggatgatgttagcgtcttcacataattggatgttcaggttttgctgtatacctttgtagctcggctttctcggtctccgcgttcccttgccctgtcaccgggcagggttggtagttggcggacattagggtctgggctgaggctagggactcgcggagtactacgaagccatcttcccagtattcctcttgggatacttcgacctgctgttgcgagatgtggagcaggagagtgcggtagtcgttgattatctcggcgactcgcatagcgcgggcttgattgactgtgcgggtattagcaggttgtggttgtttgattggttggttagggtaagcttacatccatctgccatgttttcggtagattaagtatataaaaggaaggcaatggatcgacgagtagcaatgatgcaaaaagctagtataaagaacgggctgcaaagataaccaatgagagatgaaagaaaggcaatggtcagaggaattgatggcccacgaagtcgagaatgttaggccaccaacggtttccgggggggaaaagaaggagagatataagtcttcaaagattggaaacagtgtctctcgttaccccatacatgatcaatgggtggaccaaaaagggaaaaaagccatgctataaaataataataacataaaaccaagggatttctcagcctacagcggagccgacgtcaggatacatcacgaagagaacgagctgcaccaatagacgcgcaagatcccacgatcaggtagttcgggttgtcaagcacagctgggatgggacggggccacaccataagctcccgaaaaaccgtttacggcatgacaagggccatcctgatcccaaggagagggatcggtggagaaagagagaccagaagagaccaaaagaggcatcgcatattaaaaaaaaattggcctatggaattcccagtatcccagctgtggattgggagtggatagcgttggcccgcatatgagattaggttcttgcgccgatttggcgtttctggtgcgaatagagagatggtgtttcatgctgctgattggagaatattgaatgaactactgactcagtggggagtcatgtttttttttttgttttttttgtccttttttcgtgtcgatgcatcattcccaattcctcgtgggaccctctgtcgaaattccgaaatagaaagagttcaaggtaaaagggacaagacctcagccttggacctgcattagacatttcctcggacctgaactcggacttgacgtgtagtggatctgacaagtggtgaacatgttcagctggtatattggcggagtatttgccacacgtgtagtccaatcagatgacgagaacagcctccttggataatttatcagtaagccacattgtggcgcccacaactcctagtagctgtctactgtctccttgctgttaggtaggtaacactgtgataacctggtagcgaagcaagcccaaagtttgcactggtggattctctaccttggacaagctggacaagctggatatgatctcgggccatccgaaaggggtatcgccgagagatgagattcagtatagcatcaaggtatcgtgcaggaaaataattgagttatcattcacagatcgtctgtttctctaaaataaacaccggagtccttccattactggtctcttgcctccatagcttggacccagctcactcagtccttctcggctatggcttgcagccgttcatcaatctcctcttccgtcagagcacggaacgctgtagtggtcccctcctcgccgtcggcccgcggcccaccgacgacaccaatctcgatctcgtgcttcttgaagtcgacacttagcacattgctgagggctgtaatgcccagctccacaacctcctcccagctacccggggctgcatctttgttcttcagcttcttctctaggtagttcaacgcctcctgctgcttgggaccggatgctgttgccttgtacccaacatagtaaccggccgggtcacatttgtagagctgcgggccgctctcgtcatccacagagatcaaggtcgtagccacgccaagtggccgcatgtaagcctgcgaatttcaaagagaaccatatcagctattctgtctcactgggtcgtacggtggcgggaaatcctaccctttgtgtgtagacctggctgatatttgccagtcgctttgccaggacatcgcatggcatctcatatccgaacttgtaccggaactcagcagcctcaccacgggcccggtcaacggatgcgcgagcatctgctatggaaccggtcatcacacagcctacggaaggcgaaatgcggaaaacatgtgaaacggaggacgggtcgatcaatttatcctggtaaacagcgagtgtaagcgcaatcccagcgataaaccaggaattcatcttacagcgactttcttctgcgagagtaccacggcacaatccttgcccctcacaccgatggaggtgatgttggctgaagtgatagccttgaatgcatattctgagatatttggtcagcggtcatgatgacagcgaacgaattgaggatgctgggcagatcgaggcggaatcatcgaccagtggataatacataccaacttggtacagtcgaccctggtcagagaagatagtgatatgtctgtcgtaggcgcttcctgcggagagaacgaatgtcagtcggggatgaagtcatgaggttgggctgggccatcatcgacgatggagcataccagacatgacggcgaatcttcaagtatttcaaagctggattaatagaaggaaaggaaagaaatgagcaaggacggtccaagaggatgagacgatgggggttgatcagtgacgcgtgccagagctgcctgagctcaagcttgaggtcagcttcaccgccttccaggtttctctatcaacagttcaacagcacatggtcatttaccacgaatgagctcgaggtatttcacaggtagtaagggccactgcgtgaatgattaaaagcataactcagacttgttattgttattttctttgacctttagatgtgtgaaatatcaacttggaagagaaaatgaaccaactacacacacatacttcaaacatcaatatagatgacatgaggataaaataacttttgacatgaacataattacaccgtcccaaatgctatggtagagatatatacacatccaaaccctaggtagcaatgcaaaccccaattcaatagaactagtcgctgtcgctttcgctactcgagatctcgatctgagcagtcctgagctttcgcttctgtgtcttcttcggcacagcaggctgtacctttgcttcacgaactggtacaaacttctccttcctcttggcagctttgctttccttcttcgacattgtaacaccactcgcggcacttttcttggccgaagccggggcagcagacgacttgtcatcactgtcgctgctgctgccactcgatgaggtctcgtcatcgttatccggcgcgggcttgctagcaggcttcttcgaagccggggcatcatcatcgctatcctcactgctgctgctgatatcaacgaccatggttctgttcttccgcttcttggttaccgggggttcggcagccttgggtttcggtttcgatttcggcttcttcaaatcctccgcgctgaaaagcttgccggcaacagcgaaaaagaccagctctgctcgctgcctcttcggtaaacgctttagaacgtctccctccaacttttccccgaagttgaagttgtccaaatcctcatctccctttggcaagcactcgcggaacgcattgatagcttccaggtactcggggcttgttgaaggctcctggttccccacttcttcatcctccttcggcttgtcaagatccatatcggccttgatcacgtcccgcgcagcatcgctcagtcgctgcttggcggcatcacctttcaggccctgcatgtacgccagcagcgacgtgttgtacttagatgggacatgctcaagcgaatacaggtgcttgaacagattcgtttcccggttcttctggaacttccatgtcgcgcgtgctcggtggtagtggctcagatacgagagaataggcgtctcgtggattggggcttgagtcgacgcggtgccgtcttttctttgcttctttttctcccgcttgcgctgcttcatctgttcggcagtcttgtctccaacgtcttcggtgtctgcttcggctccgtctgcgtccacttcgttggtagcggcggcgtcattgctgtcggcttcgtccgactcacttgcggagtcgccatcgaattcctttgttccgggtccgaacgagactcgctttttccttttcttgtgcgattcatcctccttgccattctggtcgctgtcatcttcggtatggcggcgcttcttctttttcttcatttcgccgtctgtctcgggtgccgtttcctcggaaatggatttgcgttttttcttatccttcttgtcggacttggcatcttttttgctggaagtggactcctgtgcgtctgcacttccctcttctgtagaatccttcgacttcttgagcttcgatccgagctttttcgacgctggggactgggcgtccgtctggtgcgccatcgttgttgtggtgggttgtgatagggtcgagcaaaattcaaatagaattgagagtagcgtgacgctctaaagaaggctggaatctgaaatccagggcctgttaatgcgacctcgactgtggtgctaagacggttggcggagactactttttttctgccgatcaattgcgcgggccaatcatgttgtcttttcgttctacatactcccgaggtctctaatggctattaagggaatcaattgaaacatgtcgaaaatatggatatgggtggattgtatagagccattagttagaaaattgtgcttaggtatcttgctgatctagatgttgtatactatcaactagattatacaagctctgtgatcaactacaacatatacaaccacatacttattggtggacccgtcatctgtggataatagtttcagaaagtgattcaggtaaacttaaggtgtcgtagcctctagtcacccgtaggttggagtcattactcttttagcatctcatattatattcgttgatatttattcagctcttgatagacttgtatacacttggatgaaaaggaaaatatcgtagaactcgtcaattgcgttaatgataccctaagaaaaatgtgacagctgcaggcatctatgtcccagttccagaagcgaagccaggatcattagccccagtatcccttctctccctgcgcacctccttctgcacaaagccctcactcccggagcctgtagccgccgcagacgccgcagccctccgtttcgccttttcccgttccttctctttttccttatccctagcgttcggaccagccgcctttcgccgtttaggcagttcatagacgtcgttgaagttcatcaccacgcctaggaagcgcatgtccacatccggctggtacgacagatcgccgaggaggacagtcagacgggagcggaactcggcggagagttcgcggaggcggacgcgaagcgaagcaagcatattgtcgtcggcggcgagattggggccagataatgaaagcggggtgttgacgccgtccacgccggcactatcgggtcggacgtccggggtcgaggccattgaggccccggtgcgggtgctggggcgggagaggagatcacgctctgtgagaccccattgaccctgggcggagcgagtttcgatcttggcgtttatctcctggcggcgggtgaattccgcaacggagaaggagtataggccatccacggcatctttgtaggcaagcatgaacttgagaatctggtggagttggctgaggaagctttcttcgggttgtttggcggaagtcgaggtcgaggtgccgtagcgcgaggaggatgcagatcctagtagacccttgtgggtgatggagttgaggtatttggtgtgtgcttcgataaggtcgtccagcgtgcagtccggtctccggattgcctcgagcagttgttcccaactggactcgatgacttcgaacaagatatagtattggagctggttgacgaagtggatcatttctgcaatcacgcagcgtgctcgcttccagtctgctccgactttatcctccacattgccgagcactccgcgtgcaccggtcatgcatcgtcgccaggtgctgttcagcgcgaactcaactcgcttgatgcgccagaggaagttgaacactttcaagtattgagttgacgcccaaggtgtgatgaccacgtccacgggagcatcgattttgtattccaatgtgaagcaatcccatccaatttcaccgtggctcagctcgagcatacgggcatcaaggcgacgcagcacttcgggggtatcatattgggcattggaagcacggatagcatgttccagctgtgcagttagggtatgtcgatattgtgaatttgctggacgatccagatttgtggcaagcgactccatgagtaaagcaatgaagtctccttggcccagtagcaggtaactcttcagtgcttttaggtgatcgaggaggttgaatttcccattcatcagggtaatcaatcgagccattgtggttttatacgcctcatcaatggagatctcgagagtggcggtgtcaccatatcgaagctccttggaggcttccttcgaataggcctccacccaagccgaatcgccgcagccatgacggatgaagttcaaggattttccaatcaagaaaatcttctttgcaaactcttgcgtaatgattgaaggtaccatgtcatcatcaagcctatatttgtcctcccaaacactggttgcaagccgccgggggtcagtcttcggccggaactctggatcagcgacaaagaattccttgtatggatctgacagttcgccatcgtaaatccatagtcgtagcatgtcgtagaatgggcgtgtcacatgtgcaagaagtttctcggcgaatgcacacacgaaggggtctccgtgggatgttgaaaagctgtgtattaaggaaatcaactggccgcccctcttacctatgatatgcgtcagcaattgggaggatattcatccgcctgtctacttactttgagcctcttccacgatcaaactcattagtcgaagggccatggtagcatctctcgtccacacaacgcatcgcttcaaggtaacgccaccctttcgtacaccttgaggctcggttccttctccaatagcggccagcgcctgtctgatttccgcctctaatgtagccactaagctaagatatgcgcgcagctcaacggcaatggcagctcgcaagctctggttcaccagtccgccttcttcgctctccacaaacacagacagccctttatagagcagacaaggctccgccaacgtgttaaggagtgaggttatcggcgcagacagattcgagggcaatttcaagctcgacgcggaactaaattgcagattcgacgaagacaacccttgcaagttgaacggaaggtcacgcagtagcctctgctcaaccgacccagaccatttcgccggtgccgatggattagcagtcgagggccgagacgaggcagcacgaacatgttcatcgctggaatggtccttcactccagtatcaatgcgagtagctggtatgtcagccgagttgcgcctagcctggtccacgccatcacggtcaatatcacgtcgcagcgaactctgtcgctgtatcttcgccggcaatacgggttggtgttgctgcgaagccgacgagctaacagcgggaccctcctcatcggagttgaccatcgtgccccgtcttgggcgtgcaccatccttcctcaacatattgtgcaagtgcgcatcttccatcaacgggctccggcttcgttccccgccctctaactcatccgaagcagataacttataaagcagaaagaggataccccatttctgcgacagcacaggctgcgtcaggaggcgcgagtagagatttgaaaaccgcaccgccttatccgggctgacattttcgcggcgcagcttgcgcttaatcagatcaggcgcgttgttgatgctctccgttcccgcgaaacttccgcggcgtccaccaagcccagctggtgatcctggatctggagcgttggtgctggcgtgggtgtcgagaatgcgccaggcgcgctccatgaggacatggtggcggcggctttcggctgaggcgagcgcttcctctgtgtcggagtagtcttcgtcttggatggcggagatcgggagcgctggggtcaggccatcgactagctgggagagggcgtcgtctaagcggcgcgcgcgggcagggttgcgggctgggtttgacattctctgcccggtgccctagtgggcgaattggtcggggtcttgtatctggaagtgcttggcgtctgtgggtgctttgtttgagatattgtcggacaagagattacggtcaggcagcgggtttggggtgaaaatgtcgcgaatcaattctgacactagattgtataattttaatgtatgcctgaggtgaatatttcaattcggatctcaatagaagcaacgcggactcaagcttgaagcttgagtgtttgtgtttgagatgtttggcgcgtgtgggtgccaatttcctaaggcaccacgatcttatcgtcctatcgctagttatcagagtctttacccgatatgaatatccctgtcatataaaacttcaaggttgctcttacgacacatctcggctcacaactccatgtcattccattgtgacatagctcttcgggctaaattgcaagaattttcaatgaatcccctcacaacaattgaatatctgcttgagcctacctacacacttcaagaagaccggagcgtggccttcaccgggcaatcatggaatatgcgcaagggacttggatttttcggtctgaattccagcgattattgggctcaggctaagctaatgcacagtcagagcgcaaccaaggtgcatgcatcataggggctatgattcggggcaaatcctcgtagacccgctatagtgacgtccataagtcgttcatacaagatctgtaggatttggagccctagaggccctaactaaaaaatcattgattgattttattcctgttttatctctgttctttatatgttcttccatttctcttcccatgtccatactttaataaaccaaatgtacaatctcctagtatggacacaggaacatctacctctgccaacgctcggccatgtttccgacttctaggtaatgcaaagctcaaattactcgctgtattcttgacgacctcgacaatcctcctactcacactatattcggggggcttgtccgaaaacatctcacctagcgcgaaagacgagctagcgaatgagaaagactactggacatgggaaacgagcactcgattccagaaatccaagcatgaaaacgacagcaatgacactgggaagtcccaaaatgcgacctgtgacacattcccgacagacgtgctatcgcgcgtccagatcatcttaaagaccagcgcaaccgaagacccaaaacgagtcgatacacacatggcctctgtaacccgctgcatttccaacttactagttgtgtccgacaaagagaccgagctccatggccatcgcgtacacgatgtcctagccgatctaccaccttcagctcgggatctgattccggagttcgaagggtatgatgcgctccaacgcggggagagtaatgtcgacggcgcgacgggctggaaactcgatcgattcaagtttcttcctatggtggagcgggctagaaaagtcaaccccggcgcggagtggtacgtctttctcgagacggatacttacttcgtatgggataacctgttccgaatgctgggacagttcgacccatccttccctctgtatatgggctcaccggcgccgggccgcgatatcggtaatggaaaagtcaactggtttgcatacggcggctcgggcttcgtgctgtccagagctgcggttgatatattgacagcgcgggaggttggtaaatacgggcagtttattgggcaatcgctcagcgaacagtatatgcagacggtgaaagatgactgctgcggcgactctgtgcttggatttgcgctgtgggaaaagggtgttgagttgtctgggatgtggccgatgttcaacgcgcatccgctggactcaattccttttggcgacgagcatcactggtgccagcctgcgatcagcatgcataaatctcgattgagtgatatgaccgggttggcgaactgggaaggtgagcgggatagaacggtatgattcggtttgctgaacctagtggtacacacatgcacatgctaatccatttcaattcagaagcccttactatacgcagacttggttgattaccatcgcctcggacagttgccagaacggaaaggatgggataatggagcctggggtgggattatcgaacatcctgatactctgccccagcatgggtcattagaagcctgtcgacaggcatgctatgacagggattggtgtatgtcttacacttatgataccgccggggcctgtgtgtttgtgcagagcttgcgacttggagctgctagcaagctggaacttgcggaccaattcacggctggatgggacaacgacaaaatacaaaattggcgggcaagcaataagtgtgaaaagcccatgtggatgaagccgagtttgacgagaattttctgaagcgctttaggtacacgacttcgaagtgatttgatatacgttaataatggatatacgatgtctgaggatacatataattcctacagatcccagggcttaagagttgcaatcatgaaatacaacgaccctctacatccagcgatgtaccggatgaagatctatgaatctataacgtgacactttcaaagcgattgtcgattcatttgcccaaccgtctggttcaaagaaactagtcaaaacacatcaaaaaatcacaaagccatccgtacgccgcccaggaatcatgtatttcgacacaagcaacccacaaatgggaaaacaaacaatgcaccgaagtgccctcaagtattagacaagcgaaaggtaaagaatcctcggggccatcaaggacaaggattaaagaaaagagaaagagaaagcgaagaagggtaaaaaatacaacaagggaaaggggaacgtcataaaagcagaaagaacatcaacctcaaggtagccataagtagaaagaagaaagcatctcatacgccggattgacacaccctcaaaaaaaggtcattccagaccaccaagttagtccgtccatttttgagtcgtgaggatcattaacacctgcccatgccaaaacagtcggcgtagccttagccgaaagaaaccgcgagtaaaacaaactcctaggaagaagagatcaaccgccggtatagcggtgaactgaatttcctacatgcggcgaaaagcaagataggtatcttgagatgagaaacaaagcctgttttctcaccgacgcatgccctgagtagggatgccgccctgcatacccatgttgggcggcatgttatacccgtggtgatcgtatccggctgacatgccgttcatcataaggggaccgagcccttgagcctgggagaccgggcagtctttgtgtgccagcaaaagagtcttgaggttgacaatctcttcacgtagttgagtcaccgtcgcagtaagggcatcattttctgaggtgaaaagctccaccttgttttgaaggttagccagccactgcttcttccgttgacgacatttcaaagccgcgacactgtgtacaaattagcatttcaagttcctgaatgtaaggtggtcattcataccgattccgctctaggaaattgcgtcgtttctcctcatcggtcatcttcttggtatccattgggaattgcttcatatcatcgtcgtcttcgtcctcgtcatccatatccgaaggcatatccatgttgggtttagcccttttgttggaacccttcggggcctcttcggccttgcggcggttattggtggagcccttggtgttctttttgcccttacccttggcgggtttggcggattcacgatcagatgcatccccaacactggtaccgttggtgttctgggagacacgtcgggcagctgcggatcgagcatcatttgacatttgggcatggttcattggcgcattgttggcctggccacccttggccagcatgaacagtccgttcgccgcatctgccgcgtcatgctgagtgaagtcagccggccgagctggctttacttccatattgacagccgcctggtcctgctcattggggttggaggtgggagcatttgaattgttcttcttcgctgtaagtgcggtgcggtggaaatcaatggtggaaggagtggcgccaccgttctgaagttgttgcaagagcgcctgtgagttgggactgggggccgggaacatagagcctccaccccccggtgtcagtcccgtgcggagggaggactcgttcggggtagggaagccgcgaccgatgctgtcaaagtagtcattggggccagtgggcccggggagcatagccggactgagaggacccgcgcgtagggagttgttccaattgtaaccacttgacgaactggtgccaggtaaggccggtgaagtcagggcagccaccgagggaagaagcgatttgcctggggtgtcggccggattccctccaaaggattgctcaaatggattgggctcgagggagaaaggattgtgcatggaattgaagtagtccggagtatcagacgcagtaggcgcacccggtcgtggaggtggcgccaacgaggtctgagtctctaggttagatttctggtcctttgacgcggcctgcgagtctggcggagaggttcgagttagcaacgcgccaagaattaatgcgatcgcaaataggtaccactgcggttttgggatcgagccggtggcttcattgtgtgtggaatatgcatgtgttggtggggaggaaatcaatgacgccagtgggtgaagtcatcgcgacggcaaaggacttggggggaatttaagggtcggggaacagtggcgtattaccaaaccaaaaaggggacttttcttttttggaagtttaatgcagaacaacataaaacgagggcagcagctccataaaatcgcatatcacagtatggtaaagcaaaagtacgaaggaaatgcgcaaaaaaaagtgtcgtgacacgaaccttctttttctgccttcttcgagtccataggggatgaagacatgtttgatcgcagagtcgatatggctggggcgaccagagcagacatttagctgggatataatggatataaaatcggtgaagccaaacaaacaatggcttctagatagtcggagagagagtgagaggaagagagtgacgtagggggaagagggatatgatgaaatttagggaatttgggggttttgctgatgaaaaaaacagaattacggtcatgtattgtattggaatcagaaacgggacggattctgtgtgtattcagcataaatgacggtaactggctttctccgaatcaggttggctgttcgtctccaccagagacacattattgtgttccttttctgctgttccacatccacgttgttctactatctcagacattctacgttctgtaccatgaggaacccctacacccttacctcggatcttcaccatacggcagaggaccaattggatataccaatcctcatttgccagtctagctgcgagaatatcaagtcgacgcttgcatctttgatacggagtttccaaggttggtctctgggtattatatccattatgtcacggtgacgacagaaatctctcccgctgtgggccatccaccctctgacagccaatcacaaaccattattccccagtgccaaggccagggatatcagctaacccgtagaatgcggtgaaaacgatgacgcaatcgatagcacgtgagggctctaccatggaattctagctagatatcttgatcttcagatatgtagaacgttgatagacagactatacacatgttggcagggtagtagatgccaaataggagacagcgagggctctactacatcgtacctgaccgagatctgtatgtgtaagcttgtacaaccccatgtaaaattattaatcagcgacccacctggtatccatggatggataccccgtacgcgtcgtattcatacggagttctccgtattatacaagttcgagatcgcgtccactcggttgtacagtacccaaatacataacattgctattgactctcttctgacgggccctggtctgatgcaataggctaatcccatgtagaaaggggattttcttactgtactgtacccggtagctggtacgaagtaataatcttatattaaccaactagttaggagtgtcgcgagaacgtgtggtccattgcatacatcgtgtcaatcttaaattgaacgccaatcctttcgatcgttacaaatagtgatctagcctaaattagcctttactcactatgccattgggtcggtttgaggataggctgttcccacaacgggagagacacttccccacagtcttggtatgcttcaaccttgattgtacgtatatgcatcacctgtctattgtgaagtagggtgctctaagtggaattagcttaattgaaatacatattgaagctaatatgtcttttgaaataacgacctcatatcaaatagtataagatgttacggatgaaacattacttccagcagtatagcagaaaccaacacagtcgagatactaggcgatccatttaacaagcttcaagagtaggctgcccactcgagctcttagcggcatatagctgcaatatcaactaccttcaatgcatgacttactccgcggtataactgctgaagataggaaagcccgaagtatgacaagatcttcagtgtaggagtggttcgtgtgcggtttctttttccgagagcaagtggacgttcgatattacatctccagtaaagccgttatcctcgccttcctaaataggcaggcaccccaaagtctacacatacctagaagcgcaaccgattaatggaaccacagccaagatttacgcttggaaataacacattcaatagagatagtccattgacataggaattatatctatcaagccctggaaagattggaatatttacaattcccccatcgttaaagaaccctcaattataccacaacttcacgaaccccggtaggtcgagtagttccaaggacccagcaggacaggaacatgataatggcgccagccctcctcgccctcgcgaccccgtcccttgacagtgaacttaacctcaacctcaggccagaagctctcgacgccctgggcctcataccagggacccacgtcgaagcgcacagaccagttggtcttgctgtctgcagcaggcagcgcagccaagatagcaggtacggactccgaggctgttccgacgggcgtccagttggcaacgcggccgtcggcgttggtggttgcgcggaatgagatgctgctggcggtggatgcaggcgtggagaggagagtcagggtcacgggcaggttggctgcgggtgtccctgataacgtgttgaggcaatggcaggtgatgggatcgcgcgctgccatggtggtggtgggttgcttgattgggtttgcgtctttggtgtgcggggccggggagatttgttgctgataaagtgcgaggcggttggtggtgcgaccaagttgttggttattttgaggggagtccattcattcaaatggtagagggaatataggagaagaagagaagaggggagaaagaaatacagaaggaggagagctcgacattgctatcaaaggttcatcggaggataccgatggccgcggagagtgccatgcagctattaattgggggtctatgacttgcgcatgtatgctgtatagcttcttcgcttctcctctttatgactatctataggaaatagaatgatctctattttgacagcttaaatgcgactttggattcgaggacaaagagcttcaagtgccatagaaacctttcgaattactagtagaataatcatgatcatcaggagcctgcctaaccatatatattgaatccaagtcaattgtacgatagaattagaaaaacatccaaaacgacaaagttgaagcgcatgatgtgaaagtcttgtcttccggaaagttcgatttgcggggctacttcgccttcaacttcccaacttcgcaacattcagaacttcaacaaatcatacacaatgtccgccgtggtacatagcgatgacctcgacatggagcctacgctccagtcgattctcaaccaacacactctccgttggatcttcgtcggaggaaaaggaggtgtgggtaagaccaccacctcgtgctcgctggcgatccagttggccaaagttcgcaaatccgtcctgctcatttcgaccgatcccgcacacaacctgagcgacgctttcggccagaagtttggaaaggaggcccgcctgatcgatggctactcaaacctgagcgcgatggagatcgaccccaatgggagcatccaggatctgctcgccaccggagatggtcagggcgaggatcccatggcaggattgggcatgggaaacatgatgcaggatttagcattcagcgtaagtgctatgtcgctgtcgcgtaatactctacgtgtcaatctaactcttggtgttaccagattcccggtgttgacgaagctatgtccttcgccgaagtcctgaagcaggtcaagtcgctttcctacgaagtcatcgtgttcgataccgcgccgaccggccacacccttcgattcctacaattccccaccgtgctcgagaaggcgctcgccaagctctcccagctctccacccagttcggtccgatgctcaactcgattctgggtgctcgtggcggtctacccgggggtcagaatatggatgagttgctgcagaagatggagtcgttgcgcgagactatcagcgaggtcaatacgcaattcaagaacccagacatgaccacctttgtgtgtgtatgcattgcagagttcttgtcgctctacgagacggaacgtatgatccaagaattgaccagctacaacatcgacacccacgcaatcgttgtcaaccagctcctattccccaaagaaggaagcagttgcgaacagtgtactgcccggagaaagatgcagaagaagtacctcgatcagattgaggagctctatgaggatttcaatgtggtgcgcatgccaatgcttgtcgaggaagtgcgtgggaaggagaagttggagaagttcagtgagatgttggtgactccatacgtgcctccgcagtaaaggcgatgtcgaggcgagatattttgttttcgctcatgtcggacgaattatgaaaagactagagaatattacgtgaagcgttggccttctgtggactaagattggaacccatgtagagcatcaggacatgaattcatgcatattctgtcgcatcttgactgacctgtgatgaaagtttgaccacatctcggtcgatcggagatacaacacaatccttgtcaaatgacattggacctaatatatatctgcgagaggggaactccaatcgttccctaaactcgtctccatctaccacgtgtttcgaccaccccccatatacaatatgatcttggcaatttagaatgcatgccctcgaagcaagtgtatgcccaaaagcgagagatgcagatgtcctcgctgcagctcagtggtccccgcgatctcacggccacaatccgtggtgccacgacaccaccgcatcaagaaccaatttggccctgcatagatttgataaaatctgcggtgagagaaaagcagacgtcagaagtcacttccactttcaaatattcctacaggtactcgtttttagggaaatactcccggagtagtccaattctatgcgccctgggattgattcgagcccgatgctcctccatgcaagcctcacttttgtccaagacagggcccttgttactctatagtaaggagtggaaaaagtgggcagaccaggatcccgtttcatcctgacggtcagaagctctaaattgacacacatcaaggtaggggaaaaaagggttgggcctcgttggccgataaagtgaggcggttctcttgtcctccgcccccgaacgttccgacatgaaccctcccctcgaggggaggacgcagaatctgagccgtctctggtgatttcctggtttcccattcttctttccgccttccgtggagactcgctccagagttaccggattcgtgggtatgtggttggtttaatttgcctatgtgcagccgacctggtggatcgtgctgttggaagaagggggggatacgcggtcccctctgccgttgacttgttgtgaaaccatattccgaaggatcaaggttggagattagtgcatttccgatagagatctgtcttattcgtctccgtctctggtgggatttctattcgatcaaccagagtatcaaccaacatatttatactccaagtctcgtccttcggagctgtgccaaaagtcccaaaaagagcttccaagcacggaccgtgtcgaactagcaaccctagcccttacttcgcctcgccttgacgcctcacctcttagccctggcaatgtctcccgtccagcaatactggcttccgggatatgggttgtcccgacatattgtcctaggccatatccagtactttcttggaccaaccgcaacagtcagaccctacagttaccaggtatgtcttgccattgcttccactacaccttctctatagcctgttctaaccagttaccattgcaggggcgcgagggttatctcatcaatggcgtgccactcacgcgggtttgtttcccccatctttatttaagcatgaattaagattggaaagagagaaagagaaaccaaacattacacaccactaacgcatccaaacaggaacaaattgatgatcttgcggtaatgtcccgcgagtatgagaagcaagaagctactcgcatggcccacaataccagcggcgcctcgacttctagccccagcagcgacaacccggcagctcagtctgagccatacatcaatgaaatcatccctattaaccaaccgggaacacgcaggcctgcagactcgcgaggcggtcgttgagaccgacgttattccattgcttccgtccattggactcggtgttccttttccagccctgggctccgttctaggattccgtcggccagcgaacatcatgaggatggaactccttgtatggcctgctctgtttagccttcgttccccgggggctggccacatggatacccaacccctgagttctgtttcccaggttcccaggtgaatacttgaatcgcaaagccaccggatggaccagtggatggaaaagaacaccaatcctggaatgggagcggctgttgtgggcaatagcggtagccctgttttgagcatgtgccttttgtttcgttctgatatacccttctttcaacccttttagtttcttataggtcaaatttgattttatacatttgaattcgggattcgggactgttagcatataacagattataagctcgactgatattttggggctgggagcggaatgatcctcaactatggctggaataggatataaacgtcaaacgagtattatgctgacacccagaatagaatcaatatatttagttctccaacgctgatatgatatagttactaggtatcaataacattctatgttgaaaacaaggatacttcggaacaaatattgccaagaaagacatcatctttcactcatctctatagaccattcgtaacagcatagataaatcagaccctaagatcaaagagcctactacatcatatctccatctctcatctttttttcccctccaaagattcgacggggggcgccatgagtctctggctgcttttggggaccctccctgtaaacctccagggtcagaaatggccaatacataaagaggatctgacacaggaagtaaaaatatggggagagagtgattgcataagaactgcaagactaaagaggtaaaagaaataagtgtggacccccgaaaaaacgccagccggatgccactctgcatgaggtccccaaacaaccgtgttgtgacctacacggggggatcactggaaaaaaatggggcaggcagaaacaagttggaaatcacataacagagagaatttcagttttcaacatcaaggtcatgcgggtgctttttattttgcaacagccgagctcaagacttgtgtgcggaagaaggcacccttggtcttctcaatgacttgctggtagaccgactgaggggggtggttcatgataacagtgccctccttgtaatcgatcttggcgtcaacccgggtgtcgcgaataaggttgacaatccacttctcaccctcgtcctggttgagaccgaggcgggcggaaaggtccctaaaaaagaaaccgttagtctactgttcgtgccgattttcccaatgtaaataacttacttgatgtcgatacgctggtgaatcttgcagtagctctcggagatgagatggcgggcagcgtcaacgaaagcgtcggcagccgacacaaggaagaaatcgctgcgcagcacatcctctgcctcgccgagcttcttctgtgcttcctcgaaatcgaaatcgacgtaaagggccttgacgaaatcggtgacggggtcggtgtactcgtagtcctcctggcgcacaacgcggatcagatccttcaactgcttctggtagacaccggagtgcttgtgggggcggctgcggttggtgatgacagcggccgcaaggtaccgcaaaacccaagggcagctggtctggatggtgttgatgtaggcgggagagaagaagaggtcggtgaggacgtcgcgggcggggtcgtggttgaagaaggggaacagcgaccagtgaatgagccacgagcggttgttgagctgagccagggggttgttgaacaggcgagtctcaattgagtccttgaccttctgaacctcctccatcgcaccctcccagttggtggtcaagatctctgatgcgagcttaccccatgtggcggcggcaaccttgtcgttgtcggtggacagaacacggaactggtaaagcagttcagcggcatttccataactgccgcagctgtactggaaccgtccgtagtcgtagagagagttgaccatctcgttagtgacaccgtgctgctcctcgaggaaccgcaagttggcggccttgtcgcttcgtaggttgcccacgacctcctcatcctgcaacaattcggaaatcttctcgctctgatcctggtaatgctgtagcttggccagaacctcctcgcgcttcttcacaaactcctcgggaatcgtgtcggaatcgttgatctcctgccacaagttggcgacgtagtcggtcatgttggtgtgcttcaagagctcgtacttcgcccgagtaatttccttatcctcctcatcaccggtagcgctgaattcgagtagggggaagacgaggtgacggtcgaggtacgggatgagtcggggcagcaaatcatgctgagaggcgatatcctcggcggtcttaggctggtgagcagcagctccgctgagcatagtctccgcggtagggggggcgttgtctgccatattggatatcaaaagatggcagaggggggtaaaaggtctagagggggatacaaaggccaaccgcgatcaatggagaatttgcagattgtgcgggcgtcggtggccctaaaccctttttggaagtgggtgctgggaaagcggtggcagaaaatctgagcagaggagcatctgatgtcgctctccgatcttcccagtctctgccttgatatccccatattctccaaccaggtcctttctttgtgtcctttagaacgcaagaaatgccgtctcttctatactctagcccgccctcggccatgcgaaagcaggtctcggccattcctcttcgcgtcaactctgcgcagtccgtggcttccgttcagacatgtagttcattttccacattatgtcctcaggcaaggctgaaagcttcacgtacgttactttttgctcagtcttattgtgattgcttgatctcctaggaactacaagagcaaagccgaaccctcggattctgtattgtcttgtaaccaacaaagagagaaagaaaatgacaaaaaaacacgcatctatgctgtgtcggtttcgtttcgaccgaggaaacggcgcatgactaacccttcatctcagatcgtcctcaattctccctccctactcttcctacccgtcaaagccgtacctttctcgctcagctcggccgtcaagcgcaagccctgaagcaacaatctaacaccccatcggcggccccatccccagccacatcagacaagaaatccagtccgaccctgcagctcaccaatctcccctatttcgtccgtcgcactgcctccaatcagctgcctgtctacgtcgtcacaaaggccggcggtaccaaacaactcaccaagctccagaagaccgaaggcgatctagtcgcgctccgtaacgacctggcttctgccctgggtgttgttgatggaaacaagcccaatccggatgttagtctcaaccaattgactggccacatcattgtcaaggtatgtttgctttacagtgcaattaactgtcatgcgacagaaactaatatattggttagggctggcgcaaacctgagattttgaacttcctcaatgagcggaaattctaaatgctctcttctcttacacctcaaatttcatctcatgcgctcgcaattgaaggtctcaccaatatttcgagcggtccaagattcactctcaaaaagcatcatcatacctcttttgcgaggggtattctagagcatacttctcggagagagcaagaatcacatcacgtcgaaaacaagggaggggaaagaaagaaacgaacgctcacgatggtccctgatgtggatggatattatctatttccttgatctcttcttcctcttccctcggtgcataccttaatctcgttgcgggttgtttttcttccttttcttccttttcattttcatttggtgtttgtctcttgtttatccggtcgtgtcttctggcgtccacctgcttttttttttgtttttgttcccctgcttttcccatctgtaacactcaatctgtacattttcgatgactctatggatgctagtgcttttatattgaaatgactacatgcatttccattcggaaatctctcgggaaactcgtattgatgcgcagtatgtttgctcctgtctgcaattagaatgtaggccacgacctatttaatactatgcctgacgagcggatggaattgagggctgtctctgttgaaaacttcgatgtagctgggttgaactacgaatgtgaatctacaaattaaatgggaacaatgggcaatcaatcatgatgcaagtatctctcgatttgtgtcgagggtattttgagcattgtacaccgaatcagaacagaacgctatctcacgagaacaaaaataaaatccccatcacccaccagcgcccaaaagataagaatagaaagactgacagtcgacatgagagtacaaatgacatgagagaaaatcaagattgtcgtatatgctaagtggaagaggatccgattcctccaaaggcgggactggaacgaaaccaacctgtcaccagcgcattggaggttcatgcagacatcatttactccgccaaccgagcatatgtgaggagttggcgaacaacaccaccatcgatgttggggaggagtagtgcacctagcagactttcttttctgggaaggattccggatgggatgttaagaggggaggtgttgtcgacttgctttgatttttcggcgagtcggcgtagaatccccagtcctcgattgacaatcgagctgaaggcatatgcgtcggcttcggcctggcttctttgccgcatgttgatttgtgggattcgttctgtgcacagtgcgcaggaaagtcgcaggagatggacagcgaacccatcaactgactcaagccatgctttggcaagagagccatcggcaaatgtggtgagaacatcggccgacaaaagaccttgcatcaaaaacactttgcgtgcgtccacaacagccatgggctttttgtcggggacacaggatatggcaagcccaaacgcgcgggttaacaactctggctggggaggtgcagacccatcaccagagaagatggctttgaagaaagttcggttcgggtcatctctagccaacattttggccagcccgtcaacggcagctggggtgtatcgatcaaccgaagagttgaatgcagtaaacatcacttttccagcgggtgatatgggttcaggttcaggcgagaacgccaacaagaaaatcaacagattcagcgcctcgtccttgccgggaatttgaacaacatgcgccaagttactcagcaagatcactgcatccttcataaaatctaacgtgttgtggcttgtccgcaggaacatcttgcgagttcccatgtaacgaaagacggaggaaaacagctgagcgacaggagggataccgagagataagaaattcgtctcgctaaacgagaaattgcgcaggatagtggtgatacagatgagtcgatcgacggcccggtctagttcgtactcaatacttccaaattcgggaacatctaaaagcgatgtgttttcagactggcagtcccgtgtgacttgatcataggaacgcagagtcatagtatccgactcttccaaggtgtgctctgctagaaggtcggcctggtcttcagcgcagtcgatcaggctctctaccaagtcatcacaattctccaatgatatctgaacagatggttcaccagaaagtgttgtgagggtatccaaagcaactcgtatctccgcgtagatcccggacttgagcgccattgtcaaggcgtggatatcgacaattcctagttctgcaaagcctggcacatctggctttagcctcgaaatatcctcgccaatctgatacatctcatcaacggcaatgggcccgtggaatcggtttcctttcagaaccatgggtttgaaggtttcctcaatagggcgttttaccagctgctcggatttttgttcttgttgtcctggctgctgttggcccggaacaggcgtaacacccttcacagattggggagaaggagctgcgaactgtccggtggcttcggtgagtggaacagctggttgcgacgccctcgagatgcttgaccggtgtccggcctgtgctggcctgctttggcttcgtgcgtgcgttggcgttgcaaatccattcactggggcattattatgaattggcgtgtgattctggggggactgtgctatcgcctgggcctgctcaaagcctggattaggcttcactgaaggagactggaattgactaggcggccgctgtatgccgccttgatgttgcagttgttgctgttgctgctgctgctgctgctgttgttgttgttgctgctgctgttgctgttgcaattgttgctgctgctgtaattgctgctgttgcatttgctgctgctgttgctgcatgtggtccgccatttgtttttgttgtgagctgatgaaagcttgttcgtagggagccaaattccttgagtggtgagcttgaatctcctgggcagccataggaaattgcatctggggaaattgcagctgatgtgcaactgctggccacatattcgttgctgtgacctttttcgaccctcccatcttcatcacggtggcgtagagctgaacgaggttgatcggacgtccactgacaataggatttgtgtccacagaaagattctggctcatcatgaatttttgcaatgagcgcaaaaatccttccgggttactgggttttgggacgttcgactgcatgttcggtggcatttgtctcataccccccatggactgctgaggattacccatcgggttcatgcctccttgaacctgccgtccagccatcgtggcattgggattcatccgtgactgttgctgcatggcatgcagccgctgttgttgattcgctagagcttgatggtagccctggggtacttgttgcatgccattgaactgcggcgcgagcatcgagggttggggaggtcccgaagtcattccaaactgctgcgcctgcataaagttggcgttctggggcgtatttacgcgactgccgtgatctgactgcgatggggacatatggggtccggggtgcggaccagcgggcgagaaggggctcggagaagccgttcccaagcgagcgctttgctgatcaaagtcctgcataataggcgaatgcgttacattcggagacgccccctgctgaagatgctggtacggcgttgggtgttgcggaaattgcggattgccgttggtcggtccttgataacctggaaacggctggtgaggggtctgagatcgcgaccccgttaagccgcccggtactggtcttggcgacatgggcataccatcttctggccgcgctcgcttggatggaatcacttggtttggattgtggaagcctggggaggcgttccgcggcacgccattattgaacatgcggaattgagatggatcctggggggtgggggagccatgaaggaacgcagtagagggatctatagtggatggatgaaaggcgccattatcctggccaggaatattcgaggcgtcgagccaggcattcatgtcgtgcggttttcctaacccatctacctaggacgagtcagcacgcgaacattggctcatgcaaccatcgctacaatgtgcaaatatgtcatctaagaatcaagcaagtataggattcgatccaatgatggacgatcaggtggacgcgtcgggagtgagatgtttgggagtcgcgcccagacccggtcgcgacacgggtcaaagagaaggtggggagggaaggcacaaccatggggaatattagagataataagggggggaaatgaggggagggaatgaggtacataccgataaggctggagtgacttgaattccgccttttatacggatgactgaagccgggtcccggaactggcagatggatatgaaggggacagaggttggccagggaaagtcacgtggtgtggaaacctaaggcaacaaaccacggaggaggacgggaggcaaaggcgtctaagatgggataatgggggtgggaagggggggggaggtcagaggctggggtaagctaaaatgttagcaaatcatagaccaggaacgtcactcttgatctttaaagagccaagctataataatgggaagctcgttcagaaaccacggggcaaatgacggttacagaacaagggcaggacaaaagggggtgcgtggccacaacccaataatctcaataccgtgtaaataataggaggagaacaagaaaaaaaagcaagcgacacgatccgatcaaccgaaatggtgtacttaccaattcacatccgttcagttagggatgaagggggaagtggagagaggagagggaaaattactgacaggtcagagctttcagtaacatcaacccggagtgttgtgcgggttacttgtgttactgggttagttcttgtcttttagaatctcgtcctgctgcagttttcttcgtcttttctcgctcgtctctttctttctcttttttgggcgttcatttttccccctttgggtctggatttcccattgggtttagttatcttgttcagagcgggtgttgccagcctcaacctgcatatgaaagagactggccacacatcggggaaaataatggggaaagccaggcaatagtggtaatatgaagggaattctctttctgaaagaaaagtctcataaaaatccccatcttcccctcggatttggtgaatcagcgaaatgatgatccattccaacggtctgcccgagtcaggttagatcgtatactccaaccccgatatggtctgaggttagcagccaccctagggataaatcccaatgagaaaaaattgccacgaaaaatggactatttccagaccatcatctggggggaaggggaaaagaaattatggaggagagaaagagagagaaaagatctagagccgcgacggtggccagcggttctccttatataaagctcgggctagcgtctgataatcatgtcgatgcgcgcccaatcctccgaaatcaccaaaaattcgaggttaacaactaagagtggattgacctgggttttctagtcacccccgtgctaggatccgactcgatccgcgtgggaaatcatgacggctttggtgcctgtcccacctaccgtgtctcggcctactccaccactagagatgattggatcaacttttcttcatttcccttctgtagggcttcgggggggcaagcttgaggtcatgactaactccaaggggacggatgcgtgtaactgtctaaaggcccttgcgcatggcggtccaatatgatattatcccacgtcgaacctgatcaggtgtccaaattgacatacgttgtgtatctacatgtcactagatgtaacaaataccccaggcagagcgtgagatcctcgttattggttctaaggctatatattccgcagtagccgctagcgtctgacgataaatttggattgatacactcacctggacaagattagtacatattgggtatctgggcacgatacaggaggattatgattagagctatcaaggatttccaaggttcggtgtaatttatcccacagttctgggtgagattattgcattgcaagttgacgggcgcttggtttagtagtgtaccgtatcgctaataattgccacaacattgaatctttaaccttcaaatgatgcgagtaaaccacatgtacgccgtattgtagaaaataatgggactaccaggatgtgggacttatgatatatttttcatgaccctaacaaactggaactaaatctacggagtacaacgaactgttggcaagaccagtcgacatcacgtgatggataagcttcctgccccatagcatcgaaagctccagatggctgaactccgagcccttcacacagcgcgtcattcaccaaccatcttcaaaactcatcacatttccttccatttccagctgatacacatactctcctttctcatcttgctcgctatccaaactatccaccatgggagacgttgccgtggagtacccggcaaacaacgtcacgcctctgaccaaactcgacgcccttgccaacttggattccctcgatggtacaggggctgatggaaatgatgaatatgctacccttaagaggctacagagacatctcgagtatgtgtgaccattatcggatggagtggtctgtactgacgtcgaacacaggtatatccaactgcaggaggaatacatcaaggatgagcagaggtatgcttattgagttctgttattgaagatccgtatcagtggctaactaccgtcgtccgatacaggagcttgaagcgggagctggttcgggcacaagaagagatcaagcgcatacagagtgtgccattggtcatcggacaatttatggaggcaatcgatcaaaagtaggccttttggtatctggatctctaggcgagatcatcgtttgctaactcacttctcttagcaccggcattgttcaaagctcgaccggttctaattacgtcgtccgtatcctctccactctcgaccgcgagaagttgaagccttcatcctcggtcgcccttcaccgccactccaatgcccttgtcgatattcttcctcccgaggctgattcctctattgcgatgctgggtgagaacgagaagcccgatgtgacgtacgcagatgtcggtggtttggatatgcagaaacaggagattcgggaggccgtcgagctgcctttgacgcatttcgaactctacaagcaaattggtgggtagttatggagatccattgcgggtaatgggtccgctaacaaatttcaggtatcgaccctcctcgtggtgtcttgctctatggccccccgggaaccggaaagaccatgctagtgaaagccgtggccaacagtacaaccgccagcttcattcgtgtcaacggatcagagtttgtacagaagtatctaggagagggacctcgtatggttcgtgacgtcttccggatggctcgtgagaactccccagccatcatcttcattgacgaaatcgacgcgatcgccacgaagcgtttcgatgcccagactggtgccgatcgtgaagttcagcgtatcctactggagttgcttaaccagatggacggtttcgaacaaaccagcaacgtcaaggtcatcatggccaccaaccgagccgacaccctggacccggctttgctgcgtcctggtcgtctggaccggaagatcgagttcccgaacctgcgtgaccgacgtgagcgccgattgatcttcacaaccatcgcggcaaggatgtcactgtcccccgaggtcgaccttgacgccttgattgtgcgcaacgacccgttgtctggtgctgtcattgctgctatcatgcaggaggctggtctgcgggccgtccgcaagaaccgttacaatattatccaatccgaccttgaagatgcttatgccgtccaggtgaagactggacaggatgatgatcggtacgtttcttgtttgtttttgggggttttctatgtcactaactgggttcttgcagtcctgacttctaccggtaaatgcttgagtttctcggggacgttggtacaagtggtaaaagcttggttttcctcaccagttgtattatcaataatatgcgccatgtgtcacaatgtttggattatgtgttgatcttacggtctccgtttagattgtagatgtagattgtaaattacaccctgcccgtagaccacttgcttgaaaatgcgtttcgaatgaatgttgttttaaatacgttggaaattgttccctgttattcttctatcgaataaccaatctgattgcagacagtgtgtatatattttagaagcggataacccgaaattcgcgatatatacctccacttacaaccaccagaatctataataaaaagcattcaagaaaccaaccacacataaagcttgacacttgccacttatcactcgaattaaaaaaggccacatagaaccatatgacaaggacaagcatactaatcggtacattcacaatgtgagcttggttatttcaatccgataatgttcctcccggtcgcgactactactttttgctttttcttcttttggccttcaaaggttacatacgttcttagtacgcaaaacgttagtatagttcaatatatatttacctatgcttgttccaagtagtagttatttccgatatgtatacggacattacggagtactccgtatgctaaaagccccattataaagttttgtttacccgcagttggtagctactacaacatctgtcgactaactaaccactgtccttcatggggtttgtagagaccttgttctgatttgatttaaataccacgttcgaactaaatatcccgaggagcttctttcaaggctggttcaaccaattcagcaatcccaattcagcaatctcttaaaacaggagaatctgaaaatcccatttcttccgcagtacgatcccgaatccgaatctatatatttgcttccacgcaggccttcctcccacggtcctctgacaccgcaaagcttcacctggcgggcgctgctagtcggactgctagtcgggatactgatcagcctttgcaacacttattatggcttacaaaccggggctggtgctcaactacctactgtgtcggctcttctggggtatctagcgattggagcacttgctaaattcaactttgcaccgctatcgaaaactgaaaatgtcctgatcgtaagcactgccacggcgacgggctgcatgcccgctacagctggattcaccgaggtcatcccagcgctcgaatatatccttgggccaaacgagggaggcccattccgactggagtatctgcagttgataacctggtccctgggactgagtttcttcggaagatgatagcgaagatatacactcttccagcatgctagcactcggtaggagacacatgagctcaaatagtggttatttcccggtggtgggcttcattgtgtcaatactagcctgtatccttaccacacattccgtattcggagacaaaatgccttcgtattacacggttgtctcgatcctgcttgtcctggcggtggcgatgactggcattcgtggtctggcggaatccgacttcaacgcaggaagcggtttaggtatggcctactctgtcagattatatcgtcgtcattccagaatatcatctctggcctgagatcgactaataaatatcttgtgtgaacagctgcccagctggttttggccgccataatcccccgctcaaaccctaatagcgtgatgatcaatatcctatctgctgcaatcgcaaatggaggtgctaaccaggccggcgatcttgcctttgacttgaagatagggcaactcatcggtgcgccatcagaagtccagacctacggccagataataggatcgattttcggcgcgcttgtctcttgcttcacgtatagactgttcaccaaccgattcccggttccaggagacttcatccaggtaccaaactcgttcctgcaagtcagtaccgcgagaatggtcttgaataaagccttccccctggtgtgggtggttacgccctgggctttggaattttcctcgccatttcaacagtggccaagatgaggtttcaagacaattggtggcatgtttatattcctagcggagtttcctttgccattggtaagccgttctctctattttgggaagactctatttatgttaatgatgttaatatcgattcacaggcatatctactccgagttttagggggagttttcatgtgggcatacctccgccgcgtaccatccaaacgcctatccattgtagtgttagccagcggaatgttgctcggagagtctctcggcagccttggagagcttgttttattctcagtgaatgctcctcatctcgggtgattgtgggagtttgtgacttggcgcagaaatgtgcatacatatcacaatgtagctataaaataggggattgttacgcctatgtacctgcaatttgtatataaaccactaacaacattaagtcacttttatcacaacaactacttcatcgtcgacaactactttaataactacttcaacaacagctccaacaactgcctcaacaactggtctatcataatcaagggattaaaacagagataagtctggcagaattgaatgggtgccttctatgtaaggcgaggtagggtggttgagttatatccccgaggtcctccttccaaggttaagcttcacctcctcctaacctttagggtgggcgtaccatccacgtgatcacatagctaccttagtcccgctgctgtatacatcatcattcttcccctgagctactggccaggctctaaggaacatgccaaaatggccgcacaccatcaatcttctttggaagatgtattatggaagtgaatcctaccaggttatccaagtgatgccaccggatatcgtcgcggatgatttcgtgctgctctcacttccgcccggtggaaacccaataccatatgtgtactggaacattggcgtgacagagccagagatgtgggagaaggcaaataaagaaggcaagttgcgagatttacctccaacccacagtgctctctatgcgccagcaattgagccaatccttcaaaccggaatcgaaggattggctttgtctgccttgacattccttgagattatttgatgacatgcagcacattacgccggtgaagcaaaaagtacatggcatttagcatgagcagagagaagaatttaggatattatatgttcatattttgtcccagggccttctagtgtgattcgtagaattcatctttcctattccgtatatgcctgataacacatcaaaacacatcagaactagagtaatacccatttaataatgctgttcagcgtttcaattcttaatatacatcggaagaattttttttatattaatctccagccttatacttcgtccccacaccgctgggaagctctattagctataatcctaagccagccgcttgatatgaactgcccaatacgttagacttcaataccgttagcactagaatcctgacagaagctgacgagttgagctaaagaccacagagatggtaaagcttagtgttctgcattaatagaaaaaggccccatcggcagagcacagacagagcacagacaaagacagggcgaacggagaagcgggttaacgaaaaagggagaagtcatagggcgacgaggactttatagaaataggcacggggaaggctatgggcgctacaccgcatcgtgcaattcaccgtcaccagagactacgtagcattcactcattggagttggcagtaaggcagcccttaagcatcaaaagggcacgcgctcccttgaaaggcactaactaagtggagtatttctagacagtttcggcccctggactagatagtatagacatatgctgagctacaacaataccccgtacactctaaagattgatggctgtatcacagcagggcacgagagcttgctgtagaacaataacatctgagcgtagccttttgccacatcgaccgtcctgcagctgccaggtacgcgggaggagtgtcttccgaccagtccgaccacggcgctaactgcgcccaggcaccagctaaacacctcccctgctcaggactgattttatatgttgtacggagtatagtctagaggagtcatagtaacgtggcgaagagatgggtctaagaaacaagaaacgagaaacattcttcgtacaagttaggagggcaatcttccgccatgtcatgagtccatcgccaaaagggggttagtgtgaccctcccgcttccgtcatcgtctctccagcctccactcccccatctaccatctcatctacccttatctcctccttccttcccatcttcaagtcattctcttctttgcatccaacatctacagctttcttttctcatcttgaatgatgaagtcattcactatcctagcagcttcggcgttgctgggcagtgctgccgccgaggttcacaagctcaagctcaacaaggtccctctgtcggagcaactggtacgatcatcccatcatccctattgccttcacaataccctggaagctgatcgattgataggacacacacaacatcgatgctcatatgcacaacttgggccagaagtacatgggaattcgtcccgagaagcaccaggacctgttccatgacacttccctgaaccctgccagtggccacaacgtgctggttgacaacttcctgaatgctcagtgtacgatagtaccaccaaaatttaggtcctgaatgatgacgctgacctttccagacttctccgagatcacgatcggtactcctccccagaccttcaaggttgtgcttgacaccggtagctccaacctgtgggtcccttcttcgcagtgcagctctatcgcctgcttccttcatagcaagtatgactcgtcttcttcgagcacctatcagaagaatggctccgagttcgagattcgctatggatctggcagcctgagcggcttcgtgtctaaggacaccctccagattggtgacttgaagatcgagggacaggacttcgccgaagctaccaatgagcctggtctggcttttgccttcggtcgctttgatggtattcttggcctcggctatgataccatttccgtcaacaagatggtccctcccttctaccacatgatcaaccagaagctggttgatgagcctgtgtttgctttctaccttggcgatgccgacaaggatggtgacaactccgaggctacttttggtggtatcgacgagagccactacactggcgagctgatcaagatccctcttcgtcgcaaggcgtactgggaggtcgagctcaactccattgcccttggcgataacgttgctgaacttgagaacaccggtgtcattctggacactggtacctctctcattgccctgccctccaccatggccgagcttctgtaagttggattctcgcttgccttcgtaatgtaatctgtttgctgacctattccacaggaacaaggagatcggtgccaccaagggctttactggtcagtacagtgtcgagtgcgacaagcgggactcgttgcccgacctcaccttcactctgggcggccacaagttcactattggcccccacgactacatcctggaggtccagggctcctgcatcagcagcttcatgggcatggacttccccgagcctgtgggtccccttgctattttgggcgatgccttcctgcgccgctggtacagtgtctatgatgtcggtaacaacgccgtcggtctggccaaggccaaataaatgcccgacggccggtgagctgtgaatatcagagaaccaggtgacacaaggagattgcttcgtatatacatgtcgcttctgagttgaacgtatggtttcatagcgcacttcattcgcctattgctaagtagcatgttgattagggtttttgtttttgatcgctggcacagccccttcgttaaggcctgtcgctcattggtactgcaaatggatatctttattggttaagatctacttattgcatctcattcttctatcgaagagtcttccctcgtagtggccttggttcagctggatccctcgataaattcctagatgtaagaacttgagttggcaattggttggagctaatgctggttaagcatcaatccacagtcaaatttctaatacgtacagtcggagaaaattagtagtatgtcactacgacttagaatatgaataaaaatatgtcgagggctatttgatcaagccatcatatcataccattcagaaaaataagatacttggactaaagtagatcgcgcgccaattaatacgaggaggtaccggctttcaagtactggtatgacataagcggaagtagctctcaacctggatcgagtgagtccccgcacaacttcaatgagcttcccttttctttgatcgaagtccacattcctccttcaatcttctccgccctttcaaattcaagcgacttaattcgcctggtgtgtgatttgcctcggacctccgcgccaggttgtgctaggcgcacggttttcttttcccatccgcgcttggagtggcgattctcattgcgctgccgaaaccaccattcacatctatttattcctctgatcgatcttggaatactgagtcataggctggaataccatcatcggaacccgatattatccagctcaacacgcgttgcgtgtcggtgatggcgtcgtagccggaaccgcacgcgatcactccattcggcccacacgtccttgacgcgcgctgtcaacataacaaggacacagaatacattttggggaactgagcattagtacattacatcgcctgggggcgaacgaagagcaacgatgcttctccgtctgcccaccggcctacattacccgatcaccgtgacgtcgctgctcaaacagcctggcgacacgattgagaaggatggggctttgttttggtatacttaccagactaccgtcaccgagggtgatggactgggcaacaacatcgaggtgaaacgtaggttcccggctagatttgaatcgactattgatggagagatcgttaaatggcaaatccaaaagggagacgttattgatgaaccgtgagtataccgacccttgtcttttgctatccttttctaatttgttgctagggtcaatgttgtcgaaatcgatgagccttgcgcgcacgagattcagtttggaggactttgtgccgagtgcgggaaggacatgactgagtatgtataagcctttcagcgggaattgagcttttctaacctgtctcgtgaacagatctacgtacaataccgaaatcacagattccatgcgcgctccaatctccatggctcatgataacctcacacttacggtcagcaaaggggaagcagctcgagtcgaagaagatgcgaaacgccggttacttgcatcgaggcgtttgaccttggtggtggatcttgatcaaactattatccatgccactgttgatccgacagtgggggaatggagagaagataagcaaaatccgaaccacgaagctgtgcgggatgtgcgacaatttcaattgatcgacgatggacctgggatgcgtggatgctggtattacatcaagctgcggccaggactagaggagttcctgcaaaatgtggctgagatttatgagctgcacatctacactatgggtactcgtgcttatgcccaacatattgttgatatcattgatcccacccgcaagctcttcggagatcgaattcttagtcgagacgagagcggaagtttgacggttaaggacctgcaacggctgttcccagtggacacaaagatggtggtaatcattgatgatcgtggtgatatctggcggtggagtcccaatcttatcaaggtctcaccttatgactttttcgtcggaattggtgatatcaattctagtttcctcccaaagaaggaagatattggagcgaacaagcctcagatcgaagcgaaggcaccggagcagaccaatgaacaccacgtcaatggcaaaacgcaagaaggggcccaggtatcagcattagaacagctggtgaccatgggtggtggagacagcccaaggctcctccaggaacagaccgatgcacaagaagagacaatattgcatcaggtggaggatcgacctttgttacagaagcaaaaggaattggaggcagaggataatcttgctgaaaccaatgaagtatcgtctagcattgaagaaacccacgaatctgcgaaaccccgacatcacctactcgaggaccatgaccaagaactcttccagctgcaaaaccgactcgaacaagtacattctcaattctatgatgaatatgacaagaggcggactctcgcccttgggggtcgggtggctgctctagggggtcgggtagctgctttaaggggagagaaggtttactcaagagacaaagacgtggatcttaaattggtccccgatgtcaaagacatcatgccgcagatcaaacggcggatccttggaggggtggtgcttgtattttcaggtgtccttcctctgggcatagacttccagaatgcagatatctcgctatgggcgaagagctttggtgtgacgatctcgtcaagggtgaatgcccgcacaactcatctcgtggctggccgcaatcgcaccgctaaggtgagagaagctactcgctatcccaacatcaagatcgtgacgacacaatggcttgtcgacgcgttggttcagtggagacatgttgacgaagaaccttatctcctcccacttcacccagacgaccgaggcgaacccctgactccgagtgagctcgagcttgaaacatccatgctctcgtccgcagacgaggatgtgacagggccccaatggacacaagaagatgacgctgaagacatcttcaagtcattcggcttggacgacacatcgccgatcgggtatgatgcggacgagcaagccgctgtacacgatgaactcaaggactttttgggcagcgatgacgaaagtgaaagtgacaacgaatccttattagacgaaccatccataggaggcaagaagcgtaaacgcaacgaagacactgaaagcggcaccgacgaagaagagtctggagacgacgacggagatgaccatgacaaacaaggctcccggctctcccaacgcatcaaacgctcctatgagcgcaacaccaagctgcgagaaattacatcggctcctgccaccggtagtgaccaggcttccccagaccgcccccaaacatcggctgtggagggggagtctgactctgagacaccgggaactagcagcgctcccaaggccgactatcccgacccagatgacgatgacgacgagctggaacgggagatgcttgctgcatttgagggcggagggtatgaccctcatgcagaggcagatcctgcagctgaggacggatagagcactcggttgattttgtgcattcgtttcggattctctttcttcttgtcataaccggagggtgtgcggttgcaatgcgctcttggcatagcgacggcgtttattaggtctatttgactttgcgtgtcttcttatctgtagttctcgggaatttgtgtatctgaggatcgatgtacaattcagttcaatatactgggattatgtctgcactatggagtactaaaacgatatgtctatatatgtagattgaaatatctcgtttgtatcctttcagaaccaaatcttatgcacaccaaaaagaaccaatgctatgtcgcttccattcaacgccacagatgcaaaaaggtggtatcacaacaaaaacaaaaaccaatgaaatcaatcataaacatcccgattcacctgccacgacataatcatcatccaaagatagaaaatcgtgttcacaagctcgagcgcaaaggcagttctccagcaattgcctataaagtcagtatacaaaacatacaaaagagggcatagaagagaactcacaaatagtactctgcgtcaaccaagccaaggtgttgatattattcccccaagccttattgttcgtcacgtagatttggcaattatcattcacattcccgacaacgccatacagctgcagcgaagtctcaatcagacccgtcagccacagcacaaagagaataaagctgccgatgatgataatgcccggtaagaggaagtggcgcgctgcaaggatcataattaggaatatgaagcacacgccgagtgcgctgctgacgaccatgtaagggaagagcctggagatgttagtatagatcctgtattgactatgacatgtgggaagaatgtggggggtaggttatgagtatgcacgtagccacacggataatggataatatagagataaatatagatcacttaccatggcgtcccaagatgcatttgtgattgcacggtcatgaaccacgagaatatccccagacatgtcgctgcgcacgatagcacaaccataatccagatgttgagttggagttcgggccagtggtagcggcggcgcatttcgcgacgcctgcggactgccattggattgcttgtgggatgtagatagagggtttgaggtgtgtgttggattgcgatgggtgatggagctcgactgcgattgtggagtggagtggagtgtgtgctttatactggtgctgttgtatactgcccgacgcaggcttggatgccctatattttgttgcgggcttgggatcggatggccagatcgggagtcaagtgagtcaagtgaatcgagtctgaagggattggtagaatcctattgtttcaggtgaggcgcggtgactgggacaacgcattgggcgcccttgagcgctcgaggccctggggattttggagtcggtgcggtgtggatatatttacaatcgtgcatgaatttctaaacgaaagaaaaggccaagatatacagagtaaagaagaaaaattaagcaaaagaaaacaaaatggccggggagggggaaatttaggaaaatggggtggcaggggatttagtgtcgttccctcggactggcagcaattctttgatctattttggactgaatcctctaaatctcaattaatatcctcttttaatccctttatcaaatcgtctttatagaagagtgtcacccaatgcactacgcaccagcgaacaccctgctcgaatggtctccgacgcacccttggactccaggctggggttcacctcgaccaagtccatcgcaatcagattcccggtctcatgcacagcctcacagatgaagtctccctcacgcaacgtcagcccaccacggactggtgtaccggtactaggagcccactgcggatccaacgcatcgacatcgaaggacaagtgaatgggagtgtcgttaccgatgtgagcgagagccatttcgacaacgcgaccgatgccatgactagcggaggaagaggtcagcacgaagatcaccaccacagcccagggaaaacaaaacagaaaacataccggtcgatatcgtgcatactgaatgccttgataccattctcccgcaagagcttcttctccccgcggtcgacatcgcgcaacccgatatagacgagcttctgcgtgctcacgatgtgctcgtcctgcatccagccaaagatatccttcttgtcctcccgggccagccgagtcaggaacgccatcggcataccgtggatgtttccgctttcgcttgtttcgggaatgttgatatcggcgtgggcgtcgacccagatgacggccatttcgcggcccagtcgctcgcggattgcctttgctgtgccggagacggtgccgatggcgatggagtggtcgccgccgagagtgagtacgaatttcccgtccttggcgtagtcgtagacctgtgagctgagcttctcggtgacggcgctgacggcgcgtggcttcttcatgcctcggtggtcggggtcttcggcggggatgtcattttcgtagtagtggactttgctgtcgtggtggacttcgtagtcgaggtcttcgctgagttgggttaggaggcctgattcgatgagggccatcggtgctgcttcgacgcccttcttgcactgttggggtttagtatgagttcatgagctatagctgtagttccaccgggtgtcttacctggccgccattgaaaccaacggcaacaacgccgagctggttcgggtgtgagaggaacctcgaggtaatggttgaaggttgtgtcattttggagaaagcagggagattggaagaggagtcaagaagaaagagagctgttcaggtgttgcgatcttgaagatctcgataagaattaaaatgtgggggctctcgataagaatatctgaagaatcgtcaggatagtcaggctgatgtcgatttgtgaaagaaacagaggataactcttcctttaaatatctcggacttgtcttacaacgtttctcacatggccccgacttcaaccgggtcggtgtttcattccttgcgcgatgcccgcgaagtcgctaaaaactgcttttagcgatcacagcgactccgccggatctccatcacttccgttaagtacaggttgaggagagcgcacccctttagggccattcggtgtcccacaagcctgggtttgacctcttacagcgagagataggccggcaattctgtcatttcatttccgggctttgatccaagcgcgtggggtggtatcggaggtccgggagcctacagggaagagaataatcgcaaggccaccgtctcggccacggtcatgagggtatcattgatgccatagaatacattccatactatactatacaagctatctcaggatcaactctcggagaacctcttctgccttgagtgcctccacccggcctttctcaccattgcgcatcatttgccccacaaaccaacccagtttacccagctgcttcttgctacggatctgctcgaccatctgcgggttcagcgcaatgaccgactccgccagagctaggtactcctcccgcgacaacggccgcagtaggagattctcctcctccagtagttgcggcactggccgttggtccccgtcaaagatggtggtcagcactagtttggctgtcgggccggtgatgagtttccgctgcagatggtcgatgagatgcgccaaggaccgggctgggacggtctccgcgtcccatgcctgatctgccttagccaggagagcgcctagctcgtgcaagacccagttgctcgccactcgcgtgagaccggcgcgcgttttgtcgtcttgatctacttgaagagtgcggaggatatccaccacatcgtggtagtactcgagacgggctccgttgtccagctcgatgagtggtttggcatcttcgattggcagattaaactcggatccaacgagcagtgtaagaacagtgtctggtgctgtcggaatagacgctcggagactagagagcaggtcctctccaatgaccagtggtggaatatcaggatcaggcatgtagcggtagtcgaccgagccctctttgccgcgaagtctgcgagtttccgtgctgccgatcgtccacccacgtgtctctccttctacaacaccgccactctcgagcacctcgatctgtcgattcttctcggcaatgatggcatcctctaccgccttgaagctgctgaggttcttaatttcggtacgctgacccagcccgctgattccatcgtactgatattgtcccggtgcttcgcctcggcgtcggaccgagacgttgacatctgcgcggagaccgcccatttccatgcccgtagtcacggcaccacaagatagtagaatggcttgcagcttccgcacgcatgctgcggccgttgcaggagtgtggatttgtggcatggtgatgatttcgaccagaggatgggacacacggttgaagtcgagaagttgtcttgagccccggtattcctgggatttggctgtgtcttgctccaactggagttgcttgatgtcaatacgaatccgttcaccgtcctccggggcgattccatcgtaatcgaataggtcaacgtagccatttcgggcgaatggttctagagcacgtaagtatattccgcgggttgaaggacaataacttaccatagtattgtgtgatttgataccccgccggctgatcctggtagaagtaatgtttccgatcaaaccgactcactcgctgtatctcacaattcagtgcaatggcagcgcggagagctggtaagagagtcgcgatttggaatgcctgtctcagatcagccctgtcgcgattccacagcattgtacacgataacactaaccggctggctacccgggaaggccagatcgaacaacgcaacgttggaattggggatatcgcttatcgaagttgccgcccctattcaattgatgagacgccgactcgtagtctccgaggtaaaaggcgtactcacgagaaaacaatttggtctctgtatccaattgcgcgtggatctccacgcccactgtcagttcccattcttccctcgatgcctcctctgtttccttgcgttgtcttttgtgtgatctgagcgctttggcttcctccttgagttgtttgcggaggggaacgcgatcggcggaggctggcggttggagatagcgggttggcgcggaggagaattgggctttagtggatgaaagggctgaccgagtcaagcgacggacgcacagagagcggagcgtaccgccaccaatacatgaccgaagcatagagatattggactcgtgttgagtgttgagtcttgaaagacgtgaatttgcgggagaagctcgggacttggcgatctgcagatcattggacttcagtctaaagagacatattcttttaaacaaaccctttcgaatatcatttttgtacacttacaatgctgtgagaaaaagaggatattattataaagttcttttaacactagcagagttgtattcagtcaaaaattcgaggtgttatacaccttattcacccgcggagtgtagcaacgctcttgatttcgtataaaatcaagtattaatatgttataagacagtctaaacatcataaagagagaaaatagacctttcctaccaagacagcgaaacctgatacttcttctagtgctctatagtgtcagtcttaagacttcaatcccgcctgacaatccatgcatgctcaggatcgtatgatgaagctcggcagatagctgaagtcaaaagaagaacagggtgctaatataatacttgttgcctgttaagtgagcctgttctaggttggatttgatctctcgaactatataaccttctcggaggagcagcgattggctcagtcgccacagtaaatgttttccatcggctcgaaatgcggggattaagtctccacaccagctagaaagaggcattggaacgaaatatcagaagtagaagactatcccaagggatagaaatagctatacgcaatcagtgacataattgatataaccttctacgtcgaaccgtggacgatagctgtctctcagccatgtacctgttgaaaagatacaaatcgactgcatcgagtcgaccgctcttaaattctagctattctatttctactatataaaacatatcgatagagactaatgaatttccatctgccatgttattgtagaagatacacacagcaacaattcctagccaatcgccctcaaggcagctagaacagaatcaaaaacagtacgaatatcaaaaagcttccgtttactcaagtcgagggaataaaaacgccagacaccctccagttccacactggatcgcaattgaaaggctccaaaaatcccacattcaacgccagactgacagacctgctgcccggattacctccacataaaaaaagtcgttatcacataacatcagcacgtgttaaactcacacattgatcaaatcatcaaatgtatcctccgccgagaacgaataagacccctcagagacgagcgaagcctccgactcccggcgcatctgctgctcaaacgcctcagccgccgccgccgcagcgggctcaagctgtagaggatcatcaaagccaaaagacatggccgtcggcgccggcgcagacacagccaccgccgccgtagccggagcttgcgtgtgttcgaggggagaaactgagacagaggggttatctattctggcgggcgattccggtagccccgcaggcgcagcgccatctttatcggtaatcttcttgaccatctgggcgaggtgaagtttaatgggctcgtccccacactgagcatgtttcagcacctcgttcttcagccccaggatctccgagcgcagccgggcaatctccgcaaccagctgctccttcttctcggactgttccttgaagttgaattccagctgctgggtgtgttccttctttttctggcgacacttgcttgcagcgagacggttgcgctcgaggaacttggcccgcttggcgcgttcgtgtggggcttcgtcgaagtccgggctgaggctggcggtggtcttgtattcgcgtaggcgccggtgtttgctcacgctttccatcatgtctagcgtgaggtcccggccttggtcatcgtatgggggcggggttggctggccattccggacctgggcgtttttgaggtcccgctcgagtgccgaatgggcaaatgctgccgagtcggccttattccacccggtggccattggtgaaactggactcagaccccagagttggtcgtcgtctggaataggaagacctaggaaatcgcctgagaaggagcttgtgaatggtgatggatcgatgagattggttgcaaggccaggtaaccctgatggtagccctgatggcattgcagatttgaggttagacatgtcaaggcaaggaagctttagagcgaaagttatgttccttctaaaacatggaagggagagaaagcaagagagcacactaaggaagctaagacaggctctcttgccctaataaccctaaacagtcaaagtctgtctttcccttggaagcaggaatgtggacggtgcctgaagaatcgcagagagtccaggtgcagtcgacctggttggagccacggtcggacaagacttcctgcggtccagaagatccgagcgaatggcaccggatgagatgatattcgggtgtcaccaaagaaaaagaaaggtagaagaggaatgtcaaaggataaaggaatgtatgaatgtatttttatcgcggtcgtgccctggcctactaggtaaaccccttcaaccctaggatgcctatcaaaacataaaacaacaaaaacaaggtaagagatagaagtgaagaaaagaacggtatccaacgggattcaaagccggccagcgaaaaacagggttggggaatatcccaacctcagtatacaagtaacaagttcaactcttttagaaatccaatcagagaaacttctggtgtctcatatgaaacatccacaacctggaatctctttgtccgattattccctgcccaccacgtatcgttctttcgtccagtgttgcagctgtcggtggataaagtgccaattattgagcaatagccccgccacgcgttgttcctcaatctccctttccactgctgagattccttcgtcgttggcttgccccctggcccctaggaggagcggtccaaacacccgcgccaactcgtggaagttgggactcgccactggatcacggagctccatcccggggtcctgggcgtcggtctccacattcaccaacaaggaaagaagcccaaataccgcacagataaggtcgagctgcatctcaggcgcaagggcgatgagcgcaagacagataagctgcactcgggcggcggtcgttgggcttgcctcagagatacaatctggcacacggagcagatgggatggattgggggtccagtgatagtacatcgccctcaggattcggtagagccggacactcccgaggatcccgtttggaagccccgccagcacggcccttaacgcccaggcgacactcaggacgggcgctgagtcctcacggagctggggcatggcaactacacgcatcgtgagggaaatcttagattcatctttctctgcctctagcacctggctagcaaagtgctcatacaagcgaatggcgactttcagatcgccgggctggacgaagatctcgggagtgttaagacctgcaggaaccgagtcagttcagtcgtgacgtagaagaagcagccaccaaccatatttgtgcagaaacatcagcgttgccacaatgtatgcggggagctgcacgggacagggggctaattccgtcagcataagatagccatgtcctccaagacgggccaaagtctgaatcgatcttccttgcaacgaagtcatcgtactggggcgacgaatattcgccaatgttttcattcgtcgcagtttaggagctggtaccaagggagttgtatcgacatccaaactggatcgcaccttgcgaactctgcccaacaatccaaatccacgacgactcgtggcttgttcgggattgcgctctgatgctataatctagtcagtggcaacccaggcccaaacaaagacaaaacgtacgtgggcttggagtatcattaaatggaatggcaagcgagatcccaaactgagctgccatcttgttgtaggccgcgatagccttgggcgagtcaagtgtgctactccaactaattcgacttgtttggctgttggccgaacttccccccggacgttcgatgaccgattcaattgtgtcgaaatcagtctcggcgataggctccagcgtcgcttcagaagccctggatgattcctcgcggctcgtacctgcactatgcctcgaactcgattttccttgtttaacgtcggtcgccttcccatctgagaacgggtccgaaccctcgtgagtatgctttttggtattgctgctactatcgtcagggtaatacagcatcagtcccggccatccccattcccccaaaggcccctgagttggcatcccgaggtgctgggcaggggtttgggagacagtagcctcggtttgactggactcctgagaatgagtcgtttgagtgctgaccttccgcccctctttcgggttatcgaacctgacagacttgccagctgtggatgattccccggcagcagtatcttgcccaacggggttggaagtcaacggtttggagctcgacctccctttgcgggcaccctcctgtgcagcttcaagctgtgtgtccgtgatggggtcatcttcctgggatagactgttgcgcaagcgagtaaccattctcttcagacgcttggtgccattcttggaccgagtaagttcgcccgtatcttgggtgtgctgaacagtcgactcagtttcggcattgtcaacgggggttgctacagccgagctaggtgccttgttcgcatcgctgggtcctgcttctgctgtcgggtcctcatcgcattgtatctcattcgaggcggcttcgggctgatgcttcaatgggtcttcctcagacgttggacgtcgtcgtggccagacagtacgagatgcagcagggttagatggctcagtcttggaccggaatacagttttgagacgccgcatgattatatttggataatgtatacgagaggaagagatggtgatgaagtagagctagaacaggggcgccgggttgtgacttggacaaggtcctgccctcgaggaaggagctgagatacatgaggaagtcacgttctaccttctatagtcctggaagaacaataattaagataatgcttaagcatcattgacattcaaatcttccgagtctattctgtgccagtgctcgtaaaaaacaaaagagagcaccggttttggaaaccatgtcattacctctgtacattcgtaaagcccaaaattaaaaaaaaataggaatagtcatgacctgggtccatatgctctcgggcatttcatatgttatcttcgtctttcgaggtctcgaagagccacaggacagatcaaaacgccggaaccatgcaaaactgaatatgtatggggaaattattttctcgaactcgatcatgcttcctcattctctccctcgagaagaatgtagtgcaggatatcactcagagtcaaaacgcccttgagcttgaagtgctcatccacgacgacgagacggtgcactcgagatttgcggatagtatcaaagatagtatccagtccatcattcaatgaacatgtgtagatacccgggaaaccctgcgcagaacatcagtatcagaacgatatcactaggaacggaggttcatttaccggcgaacgtttcttcaatgcttccccaaccgtgagactcaagtcatcgtagaaaccacccttgatcaaagtaatgacatcgaccgactcgaatacattatacaccacaccttccgagttcacgatcggtacactggatatgctgcgctcgaccaaaatatggatgacatcaataaccggggtatccatcgaagccgtggcgacgttatcatacgatccaagcaagagctcgcccagcggacgacggagctgctgcgtatcggggacattgacggcaacgaatttcaagatacggtattgcgtgatgacgctgagaacgtggggccgctcggtctggctatcgctggtgacgagggggatacggcgggcgcgcgattccaacatgcgccgacaggcatcgtagagagggcgctcggggtcgatggagacggtctctggcggcgcgacgcctagcgctttttcaacctctgtatattcccgttagctgcggggtgtacctgcagagatggggcgacacgatccaacgcacctcgcaaactgtccaggcggaattgatcgatctgatccagcgccgcggggttttggaaatagtattggatgacattgatatagtcggaagtggtcagaagacctgcgaatttggacgctttggagtcccacaacggagctgaaacgatgcctgtacctcccgatttccgggctcacgatcagcttgagttcaataattttgtagagaaggagggggaatcgcgacaaacataccgttttgaatcagaatgttcagactctccttgacggaaagcgacgtatcgaagatgatgagtcggaagctgagcggcaggacatcgtaggagtttcgggccttaaggaaatcgcgaatggcacgctattttctgcgttagtcaagatctggatattcccaggtgatctaatctggtgactggtgaacccatgccgaaacacgttcacaatgtccgatccccatgtccaacgtcaggtataaagaggggttgtctccccttgaaaaagcaaaaacggacaagacttacaaggccctgtcgctcttcccgatcgatcgctcgctcggaggccattggggggcgtaggtacgaggatgggctgcacgaaaggcgcgtgaccagaggaaggtcccgagtcgagggtcttccgcctttcgatatgtggggggttgagggatcctacgcaacccagattgaaatttattcgagagattaaaggagattaatggaatactttccgattttcttccctattttcagagattatcacattcagttaattatttcctgcgaatgagggggctgcaagtacgcggactatacgggaataccaaatgatccttgttcaacgatgtaagttgtatacgacatggataacctggcgacaactgacacctagttcctcaggcatatccccagattccgtctaagaaaatcttccatctggactaggacgtggggcagccaccgacttccggatatagagcacaatgtccgagaacatttcctcatcagggccaaactcatgctgctcataaccctccagcattgctctgactcgcggagaatcaggatcagtcctaatgaaaatattagcagactgaacagagggtagaacatgacctgacactcacagcccccgaacaagtccatcgttgtcccccactcgaccccaaataataaccgcaggccgagcaatgtccgtaataatctccttgacaggcacattcggtgctatcgagagtatgatcgagtgctcgtccacctcgagccaaccacgcggatcttcaattacctcgatgccggcctcgtccagaatcttcgtgtctacctcggtgtagtccgggtcctgtgcgtagcatacgactttctctttgttgtctctttcttttagccactccataatggtaacgaagagcgcatgctgagacgcagatcgccacccattcctggtatacagactgccatccgcattgaaacattggaaggacatcgcgcccagagcgaaaccgacgaccttgtcaatttcatgattctttgcagaagataacaggattgtcttgagtttttcgcaggctagactctccttccattcctcggccttgtcttggaatatctttgtgaccacttcacggtccaggggaccacgccgcgggatgattttctcggtcttactatcccattcgtgtgtccgatgcatgacactgactgagcaaggctcccaatgcgacaacgggtaatctcttcggttgatctcgttcctgagagatgctcgacaccggtaagaaaggaccagttccttgctggatgatgttagttctcgccataatgtgaggctattagacatgtactcaccacacaaattccaatgccagatcgtcctcccaccattgccgaacctttcccgtctcgacgtcgcactcaacaaccgcgccggttatgtctttgctaagtatcttatcgccttcgactgggtctcgcttgatgtgatcccacatatcttgaatgatctctttggtgaaaaatggcaccccggatgcgtagagtctatcgataattgcctttgcttcctccagggttggcacctccccaggttcaaccaagtaacaatgtgtgagtttgtagtcaagatctaaccgcgagattttttctccatcgacaggctccagattgtttacgtcgctcatgttggcgatctggatagaataggtttgagtatgaacaggaaaaggaaaaggaaaaaaagggaataatttattttggggccgtatgtatctatatacgagcattgctattgcggccggcgcgtaactgcgcattcatcatgcacctacatatcacatgagcggggtacaatcaatggtaatcataatatctactgatagctgagtggagagaaagcggctataggacgaaagaaatgatatgtttcgatactcccaacctgcctaagatatccaaagaggcccctatcccgacctcatggctgtgacaacatccttccggataaaaaccatagcacccctgaactttccgtcagacacgagtttcggatcgagtctatgatcctcgtactcctccatcattttcgtgatgcggggggtcgagtcagggtcaatcctagcgagcattcatgttagctttgggatcaaatctcatagcacatattagaaagtccaattaatcactcacacagtgcccttcgtttgtccaaagcgaagccagatcaccatggcaggtctagcgatatccacgatgatacttttgacaggtatgttgggtgctatggacagcacaatcgaccggtcatcaaccttgagaaagccatccggatcgtcaaccacctggatgccgacaccgttgaggacttccctatcgacaagtgtgtactccggatcctgcacgtagcaagagagctccttctcacccggccgcttctttctcagccagtcctttgcggtaagcagcaacgcgtgctggaaggcagagttgggtctgcctagccgggacaggctaccgcaagcaatcccgacgatgttgttgattttgtcagctctggttgttgacaaaagcacttcaagagtcctgtgggcctcacttgtttcccaggcccgtctctccttctcgaaggtaacacccgcatgcttgctactccatatttcttcctttgtaccgaacggatatacctcatgcgtcagtcgcaggggaatgagctccgaaattggaatgtcaatgccatccggatatctcattatgtccgctatgagccttcctgcatgattgtagtcgatggcaaggtccaagctagatgtgtcagctctcattgaaacaaatctgccagtagctaaatcaagcgtgagttgagtaacttactagatatattcccgttcaacgggatttgcgaaggttgtcgagaagaaatgatgtcccaagttcactgtgccctcgaaaacagcgccggtgaggcccctcacggtgactttgtctcccatggtacgtcggctcttcagctgctccccgagatcttggagcgcctttttggtgaaaattggccggccggcttcgtaccattgattgacaaagtctatcgcctgcttctttgtcatcgtcagctgttgacgagtcgaagtgttcgatgagtctgtgtccggctggggtttccagtgcaaagactctgagcgcactgcagtcatgatgataggagtcgaagtcttgcagaactgagaagctgggttgaatatcaagaatcttctgagggttgtagcttcatattaatacatcttggaggacattgctcaaaaagcctacgctgcgaacatgtagtagaagacagtataccacatcttctaccacattcgcgtgacacgttaacatccactaggcgagcacagtctgtgtccaattgtttcagctacttctgtttcctgtgttggttggacgatagattgtgggatatgacttgaattgaaaatcggtagaagggagaaagcgctctcagacaagaaacagaacagatatagccccatttaagccataaatagagatcatggttcttattgtggcgtagtgttagtacgctatattattttccacaagcgcttaatccgaggacctgcaagaaaatagaagtcagacatgactcaaagttcttaaccatctgaatattccccatggtagcctgacagacaacattttgccctgtaccaggaggattagacaactgggaatctcaggagtcggcgcgtaccacccgtcatgcgcccaggaatatagtatagtacaagagatatagaaggagtcagcggatgcgaatgaagaatgtgggaaagagccatccatcgcttttttatcttatattaatcaaagccatatatattatatacatggccattcactgcaaaggcaacatgaactatctgacaacgtgttgacatgcaagaactattgtactataggcttcggcggactttcaattaatctgttagatgatgtatattaaattttcattgaaagaagttgtttgtgccgagagaaggaattagggcgaagagtgacaatcaatagtaaccagtaaccatctacctatttataggcctgcaggggtatgaatcccgaagtagcaggctagcgacgtacgagaacaagagctgaaggaaggcaaccgtgctgttggtagagcaaagcgccaggaaaccgaatgaaatcatggctatcatatgatatggctctaaagataaatatgagaggcaaaaaacccccaaacccaaccggtaacgccgtcgcacccatgcaaggtatcatcgcaaagcacattttgtccaaattctagaccagccagaacctgatctcttgggaggtaaatacatgagagaactgtaagagacgcgaagctcgacgaatctcaacgagaactgaatatccgtagccgggcctagaggtgcccgtgtaacttgaatcggtagatgcaggtgtggtttgcaccccaatttgaagtcactcggaaaacaaccttgtccacacggatggttgacacgtcgacaatggtgttcagcttgaatgcttgcgcgtagtctgggccgtggaggtcgtattccactttcccgatgcggtagaagttggggccgagaattgggtcatccgagtaagcgctagggggctcaaaggggttgctccgacgcaatagatccattaccagcccgtgaagtgagccaattccagggattaggaatcctccaagtcccgtttcacgggacgaaggggcctgggtgaacggtggcggttgtgacactgtggcatctccgaagactttcaggaagccaacacggccaggtttagcctcgggtgttggtttggctttgattggtattttgtgggggttcactttgaagcgagcccacacctcgattattcgaggtgccgcctctggttcgagagaagcgcccacgggaatgtgctcaactaccaactcttctgccacgatatcgcggccgagaagtacagatagttgagtcgttccattgcgaggagcactgcaccagcagtcgcctacctcttcccacgtggtaagggcagacatgggggattgtggtgctcgaatggagcgcctggcaacaaacgagctcgcccagaggagtgctcgtaatgatgcgctctgtttgggacccaaagtcggtgaagttttggctgggtcaatcattgcccccaatgccaccgagaggaaatttaccttatagattggcttccgatggaggtttgcatccgtgggcgctgaatcatgaacgttggaaagcgactgttctgatcgaacagaattgatctcattcgacaaggatgacatctgaacgtccaattttgatacctgactccgaaggctatggaaaacttccggtttagatatgtttatgtttgaagaggaatcccaatccagagtaccgtggtccagatattcacgaaactttgcggcgatgaggggcacgaagatgaagctcagaaacaaaagcagatagaacgcagcccgaatccaattttggtagcggccctccattgctgcttcaaatgtctgcgtccagctttttcgttgtgactcgatggggggttcattgcgactctctggctcccgacgactctctggctcccgacgtcggggtcgcactgctcctagccatcgacgcaaaacgctttccttggggatgtcgggttcgaaatcttgatatatcgccggttcaaactcggcgtcttcctcatcctcctcgagaacattagccaggccagaaattcttcgaggaggcgccgtgatgttgcgtccatgtttgcttggccgcgttctttgtaggtcatcttcgttaatatcacgttctagattccaagacgcgacagaaacattatcaacggagctgtggcggaatggcgtgctgctgcccgaaggattattaatacgaggagatcccatccgttgaagcggcgatggataaagcggagagtttgacaagtgtcgttgcaatgggggttgagcgtcaggactagagtccgtagatatcgaatgtggaactggaggcgaaggagtcttatcggagtgttcatccactgcattatgcagcgactgctgaagctgggtttggtcgggggttggctcacgctttggctggcgtgcttgaacgccttgtttcttcttcgtagcggctgttcgctttcgagcagtctcaagacgggcatcgactaccccagctatctgatctatccccatgttgggtcggatcgacatgcgctgaggtaatgctgtggtagtagcagcgccataattgaatgatgcttgaactggaacactgggcaaaacaggcccttgcacaaggtcgagtattgactcaaattcgggttcctgatgtggtcgttgaggagttgcgccagcccggcgtgtagcacgtttgggcggcatctgtgttgttaacccctagggttgattccaaagattatactttgttcttgttttgtatctatttgagatatcagctttggactggacaggtaaagctaaagaacccagacaatgggatggccaatgtatcaattgaagccttgcagatactaaatattgattgaaacacaatatccacacattcatgcacaagacataatgcgacacgaactggaaatgatggcacgcgaatggaacatatgcaagtatggtggaccagggccattaccacaactacagagcaagaaaaagaagtgacaacaatctcagacttaccacagaacagattgaaaatgcgctctgacaggccgtgtgcagatgtccgaagcctgtagatcgcgaccccggagagacgcgcagacgcgacggtaacgtgacttgcagctgccagctatcagcatccgagggtgatgccactcaagaggtcgagaagtgttcgctttatttcaatgagagcgacaatttggtctgaattgccagggatccgatggataactcaggaggttgagtgaagtgaggaaaagtagacgagggaaaagggtggaggcctcttgaagatcactgaagaatctcaaatctcgactttttgagctgtaattcacatcgaactctgcatggaattacttgttctttatatttttgttgttctttatagaatacagtctcacttccattgtctttgttgttagatctctttgtcaacccttgcgcctcggactgctacgatcttgacactatttttgtttcatttccttacatccctgtttgaaggactttgttcatgttgtatatagaataactaacgtgatgctgctcctgattcgcccggtcgctactaagacatagattgaatactatacaatggacgcaaaaaggctgagctgaaaagaagatgagacccccgtccccccaagtatgcacccctaggaagagatcttacacgtctagcatgtccaggcagccatagtgccatctttacgtccctccacaaggtagccatctttaagacaaacccgctcaacggttgcagggagtggcccgtcgtcatcaagcccaacacctggaccacagtcccagtgcttgccatcggccttgtcatagaccttgaccacaccctccccggcagcggccacgatccgtttggagtcgaacatcatatcggtgatcggcttgtcataagcgtaagcgtcataaatagatcccatgcgtagatcccaaatctgtagataattagaaacaatgggtaagtaggaaagcaaaaactggagtgcgtacccgaatgctgcgatcaagactacccgtgaccagatgcacgtcgtcaaattgaagacatgtgaccggccccgtgtgtccgacgaggctccggtggacatgaccactgcgcaaatcccagagacggaccatgccatctgctgtaccgcatgccagcgcggcgtcaaagcactgtactgcgccaataaagtcggccgaagcatcgggcgtgcgacccgatggtcgccagtcagtgtctcccatcatagatgacgatgcttgggcggccgcccacaaaacatccagagtttggacacagcggcctgtgactagatcccattgtctgagcgtcttgtctgcagaacccgagatgagggtgtcgcccttgaaatgaagcgctgtcacctcatcgacgtgtgcctccagcgagaatacattgcagtcttcgaggttagaggtcggcggtgccgggaagttgtgttctgcctttccctcttcttggtcacgctcgtgcttgttgaggcgcccgtcccgagtcgtgggccgagcacggctcaggtcccacagcttgacagaggcatccatagaccccgtagcaacaatgttatcttcgacttgcaagcagcgaaccgaggcattgtgtccctccaagaaaccagagcatcggccgacattcatgtcccaaaccctcacggtatcatctagtgcagcactaaccatagtaccaaacggatagtcgaagtcaactgctgtgaccatgtcggtgtgcgcttctatttccttgatcaaagaccctggggcaaagtgttcatgtagaattggcatcgaccgtttccctaaatcagctgtcagttgtgattcgtgtatcagacagaaggattccatacgattacttcgatgtcgtagacttttcggtgaagatgaggggagcttctcataaatcgattctgacatgaacgaagcgtccatcgctggatctccggatgacacaatagaaccatcctggccgtctgaccgcggcgtcgctactggtgtgtcctgtgatacctcttctgggaaatcttccagcttattatcgagatcgatcactgttccattttaatcagttttctccgcataatctcgtttgtctcaaaacatcgacccacgttcttgctccaatcccgcttcgtccatttccaagccggccaatcgatcgagaacaatcgtgcggattttgtgcaagttggcgaccttgttatcgatttcgtggatctctgcgctgcacatgtttttccggattcccatcaactccaatttgcgactcagtgatttccgctggtcctttaacccggccgggccggcattcaagctgccgcctctctcggcgtccttgagaagcttccccttggagctccgccttcggtgtcgcttcttctcgggttcatcgggaacggaggcctggaagccttggaaaagggagtaggagctggtgtcttcaggaatgttggcaagaagatcatccgagaggaacgaaagggcacgggactggatctcggtagttgaaagctttgagcggacaaggtcggtcggtgttgtttgtgttagagagaacaccttgcgctgcgtagccggtcgacgcagctcgcggtggatgtcggacatagcattgtgcaagttggtggcattctgttcgcccggtccgatcaggtgtcctgcggtcgtcgtgacttttcgtccgaaggcttcgaggtgacgagtctgcaattaccgcagatgaaatccaatcagtctgtagcttggtgggaggcgtcggagggtgggaaaaagcctaccgttaagccggtgcccaaaaggccatcgccctcgacgatatctgacagacccgacggtgagtcgtcgcgacgctggttctccatgagacggagagtttcttgggctcaaccgaaacccatgcgatatgagaagaggaaagttggaagcttgcggtaggttgaagtaggagacttggtgtcacgcggatttaccgcgttccccgggtactgccgtatggtacttttacaagccaaaaccagttaggtacttatgtaaatctctatgtgtgcggagtatgcgctgtcactttggacttgccctaattcaagtgacttggaacaatatttggtcaaaatgcaaggatgttcaagtgtgttgattctcgattgtggtatttctgcaactgcctcggtcgcatatggtcaaaagtacccaatgcgatagatcactatacactagagcatcgtaagggttctagtgtttgttcaccgttttttctattcagaaattgttgagccctgcatagaagaatgatgtagagctttctgacacagcatatttcttttccaccccctcttctacaacgtataaataggaagacgagcggagtggacttgaagccggaactcacttcgcggtcccacagactctccatctacacatcaccatatatcaagccatggataccgccattgacctttcggatgctctcaaggcattggaccttgctaatattcgtttccagttgatgtgagctctcaccctttccttcagctgcaagactccccatatctttcccccgcccccgccatatccttcaatacacactatagctcgaaacaccacaattccccagactccaccacagtgagagccgctagctaaaagtacagacacgcagtcgactagaagacacaattaccttccatctgatcgaacgggttcaattcccgctgaacaagaccatctacgtccccggcggcgtcaaaatccccaacagcgagctcagtctgctagactacctgctccgcgaacaagagcgcatacagtcccgagttcgccgctaccaatcacctgacgagtaccccttcttcccggaagtgcttgaagagccaatcctgcagccgctggtatacccgcgcatcctgcacgagaacgatgtctgcgtcaacgacgtgatcaaggagcgatacatcagcgaggtcctaccagcagtgtgccccaagtttggacgggaggaccgtggcgagacacaggagaactacggctccgcggcgacctgcgacgttgcttgtttgcaggcgctatcgcgccgcattcattttggaaagttcgttgccgagtcaaagttccagaaggatcctgagacttttgtgcgtctggtcaaggccgaggaccgggcggggatcgacgctgctattactaattctgctgttgagctcaaggtccttgagcgtttgggcctcaaggcgaagacttatggcactgaccctgctttgcctgatgagaatggtcccaaaattaacattgatgctgtcgttgctatgtacaaggtgcgaaatgacatttggggttttgcttttaggtgtatattcgctgacttctgtgctactttgataggaatgtgtcatcccattgaccaagattgtcgaggtcgagtacctcatgcagcgactcaagggcacacaatgggaataatgagcacctgaacatttatgagaatgacgtggccgatgcaacactgtcctcgggatatacagaaaacaaaaggcaaagcaaaataagctagaactcaatagattttgtcgtaaacaggacatgaaatgcatcagactacaaagtcttaaccttggctacgacatgtattgcgtaagagccttaaccataggctcaaacttggccgcctcaatcaaaatcaagctgcctttcgtccggatacccaactcctggaacgcacgcttcgagtctgcgtgcccttcatcggactgatgggtataatcaatagagccagcacacagcgcatggcgctctataacctcatcttccgggtggaagaagaatcgctcggcctgctcaccacccttcttctttttcttctggggccgcgactcttgctgatcaagctttgactcgacttcctcgtagttcttcgagaggaccagatagtgtgagaatgtgtagggctccttgtcctcaacagcccaggcaatctcctcctggagcatgttgtacatgggagggacaatctcggacggcatgttgatcagtcgctcggtcagaatgagaccgataggagggatcggggtttgggaaaggagctgggaagcggcggagagggacgggttggaggcggctttggtcttgaggtagttgatcaggtccttgacgacgggtttatcctgggagcagatagttagtacaacgaagaggcgaagatcgggaagtaacgaaccttgtgttcctgcaggttgataattgacaaaaccgcgtaggggtctgattcatgtccatcaaccttcactgttgatcccagtgttggctgagagagaatcaaatcggccagcgcggacaggtcgaagatctgagcatcgttgtcgaatagttggcgcaagagattcttcaggccgtggaaatcgataggctgggggtcgaaccattcgaaatctacgttgaccatgtccatatcctgcagtcgtcatgattgttagcaatccgacggcacacagtccggggttcaagtctgacctcgtcggagtcggactcctctggcttggtgccgcccatggtgacatcaccaggatctttccgcttgaccatattgtgctaattgaggtatttttgtctgggattggtagaatcggagttcaaaagttgatcttggccccgcgttcggtgctgtcgaactttttccttatcggttgttatcgccagcgtaggtcattgttggctgttttccgtcgatggatggatttcaatgttctatattaggctttatatatcatttagggtcttaagacaacttgaaagaagactttaaaaaagatttgttaatttatagggtgtcattgacaagctgtctgggcgtaatggttgatatacttgcacctaagatataccaatacactaccgaaatccagaatataacagcgtccgaagcttcatagaaatgcccatctatatactgtgtggtaaaatacaaaatccaaatatacctgctttttcaagccgagcccccaagtctagacatcatactcaaccgcctcgacagtcggcactttatgaagcttaatatcaaagaactgagcgacaagctgcacacaatcccaaataacctggacctcctccttagggacaccaaggcgcctcgtaccacgaatgtgccaatgagtctccttgggcagattctgaatcatgataccaggcagcacaacaagctcagtatcaacatcatccaagatctgacgatctgacaagaacagcccgtaagtaatctccttggacagccaagaaaagtccttatgcgcactgaacaaatccagcgtgccagtagtgttgcgcgcatacagtttctggagccacccagtgccgcgctcgtggttggcctcgtcgcattgccatccctcgcgagtgaaggtgaaatccttgtcctcgtcgcgctcaacctcggtaatggccaggattgactcaatgggcttgcatactccgataataggcacggctttgacaagcgcctcgcgcagtcggcggatcagggcttgtcgggctgctgaggtcgcatattctgcttgctgggtgaggtggaggtagagctggtctgctcgctctgggtctgggccggcggctagtgtggtaatggctagtatgtaccatttatcgctgcccagactggtagttttgaagcggttctctagctcagtgaaaagttggcggtatccgggttggacttccgctgttgttgccgtggagaaactcatggttgttcttggttggtatggtagaagaattgaaacgattttaggcttcagctgcagaaagttgccggctcggattggtaatcgagagaacatgccaaggtggcgtatattgtatgattacagcgtttaagacaacgtcaagttggtgattccatcaatcgtagtacaccccgatggccgaagtgggtcgcggcaaattcaaagcattttgtatgatatcacaccacttctgtttcctttccagggtagtgatatgctcggctttacgagaaaacatcaagatagattgttcctacgttaattgcttctttagttagctcaggctttaccgcctgctcactgtgatctgctccctgatggttacataagcgtattgtcccgccgacctcggtcccgagatgccgcccaagtgccggcgctggctcgggagcacccgcatccttcccgctcggtacccagcgcaacaatagtacacgatctcttcaggtgtcttgctctataggatattgtctagaatttactttcaacgtacactattgaaaacatatattcttgtctcgtagaagcatgaaactaaatacacattggcaaacatataatatgtggtcatcccatatcgcaacagatacaaatcagactatatgctgccacggacttccaattctcatttatcttcctttgtctcgatgacttccttctcttcctttgtctcgatgccttccttggtctcttcctcgtggaaaaggttgaccttggtagacgcgaacttgcgggcggagaccttttgttcgaacaaagcgtccatctcggcataagtacgacccttgggttctggtaggcggaagaacgaccagatgaaggaggcaaggcataatccaccccagaagaagccggcctttcctctccagttccagccatccacattcagcatatacgggatcaccaccccgttgaagatgctgaagcagttgtacagattgcgggcgagaaccacggtcttgatgcgaagccggattgtaggaatttcggacacgagtgaatagcaaacaggcccggccgaggaatcataaatgaaggtgtagaccaagagcatggagccggtcgcccaggaggtagccgacgttgaaggggcaatcgcgataaatccgattacaaagaggatgacgcaaagaacagccagactgtagacatacaaagttcgtcgaccaagataggacatgagaacccaggagaagagagtgccaaagaaaccgattgcgtattgagccaaggacatgttgaatgactgagagacgggcaatccggctcgctggtagaaaacagtcgagtatgccatcagaccggctccgcagagattctgtgctgcccagatcaaacatgagatctcggtccggcggagattggtaccgcggaaacaatcgaagtagctggtaccttcattcagctgtttctcgacctcgttggtatggatgatcatggctacagtctcctccgcattgaagtcggtgtttcctctagacgttaaccttgtaagagatttgacggcctcctgtagtcggcccttccggacgagccaccaggggctctctggagccatcagaacgccaatgaagatcggaacgggccaaatccactggatggcaaatggaatgcggtaagcccattcgtcatttcgagactccagacccttcaagacgcccgaggcaatcaactgccccattacccagcagaggttgacgtaagttgtgaggtaggcacgtagggcgacagggcagacttcggacgcataagtgacagacagggtctggtagactcccagagggatacccattaggatctcaccgaccagcagcgtctcaacgttgggggcaaagaatagaatgaagatgaaggccattgtggcaatgagagatcccaacatggtcttgcggtacccaaatcgttcggagacgataccgttggcaaacaatcccaggatctgaccacaattcatagcattggataatcctgcttgccatgctgccgagagcccttgggagccatctgaaagtgtgtgtccatatttttggttgaaggcggggaaaccgtagaacgatcccatgagcacgacgtcgtaaccctccatcacaattgctgtcgagatcagaacagaccatccaattgccttcgggtacagcttcaaagcctgccacagtgacatgcggtgttctttgtcggtggcgatctgggcctcctggaccaatgtaccaggatcgacgtccattggcgacttgtcgtcgggtgtctcgacatgctgggcagccgatttgaaatccatctcgttgattcagaggggcgaggtgttgaaaaaacgaggaaggtgatattggttcccacgagggtggatgaattctgagcgactaagcgtgcaccaactctatatatatcatcttccagaaatgatatttctaaaatatgaagtacatcggaacttccgtcggcgttaattttgctttttccaaaagggggtacgagttttctccccggatctcggtgtgatcataggcttcccgggccgaagaacggccgttcgtattgcagtggcttgtgactgaggaatgttcgaaaagccgactgatcatgttgtccctctgtaaagccagggtaatgagaggaagcttttcacatcgtatgaaaccagcagcaacaagcaatccgatgcggcttcaataacgaacgaaaacagagaatcggtaaaatttcctgtaaacagactccgttgccctaaggctgagacacggggtaatttgctcttcccagtggcttaggcggggaagcgacggggtaaaaaatctggttggccatcccacattgcagaaactggggaaatgtgcaagtcaaggaccggcccttctacggagctgcaccccgacctagcaaggttcgactaatgcggtcttgataatcctggtaaacacatcttgcaacttgaacatgcgaaccgtgcgggccgtgcattcgatctggattggccgccaatttggtaataattggaaagaaatatgacagtgacacgggagggagtttgccacggaactctgttggtcaagtgacccgacattaccccgtccacttcattaattgcggggtccccagaaactcggctgaccccgtggtttcccggctccggagtcagaggcccaacccccgaagcgacatggaagacagactcaatgtataacaaagcaaggtacgaatgatccgagttcgacgaactgcatatttttctaagtttctccacagccaactttgaacggaccttactgtacaggaagaagtcaagagcaaaaaatatattaataccatgacgacgccttgacagtgcacaccgacttggcatggaatcggaatcgaacaggatttgttggcccacccgctgccgtcaccgacgagatcggaaacagagcactcatactcgcttcgatcactgggatgaatactgctctcgaagaaatagttccatagctgctgtcaactgctgcgggttcaacaaaggccgctcgaaaaacaaatgttccacgcagctaccagttttgagcagtcggtgaaactcgcagagccatggtctcatcattttgtggccttcgctgactccacgaccctgtaaaggtgctggacattatatttgcgtaacgggcgggcagatatcacatgaacgctgttcaagctcgctaaagtcttccacgcgcatggttgatgagtggggttgcttggcgctcgttcggctcgcgtaagttcgaacgggtggcactcggattaccttctaggtacggagtcctccgtagtgagctagtcacctgcgagagtggaacttttcgcttctatgatgatctgtgtgtgcatcttcaataggcagctatcccgtgactataggttcaatattcggagcgggtaaagacctggggaaattccgcgggcggataatcggagtttactggggaaaggcattgtagggctctcgggctaatcatctcggaacgggctatcatcggtgttactgcggagtagatcttacaattgggagattgcccatcagaaggcccttataaatccgctcgctcacttgcagattgaacatttcaagagaattttctattgatcttttcctctcgttttgtttgcaatctcaaaatgggctcaatcgataattctatagacgcgaacgccgtcgctggacgacggaccgctaaggcttggtggaaagagtcctcggtgtaccaaatttacccagcttctttcaaggatagtaatggcgacggcgtgggtgatattcccggaatcacctccaagttggactacatccacaaactcggcgtggatattgtctggcttagtcccgtatttaaatcaccccaggtcgacatgggttacgatatttcggactactacagtattcacgcgccatacggcactgtcgaggatgtcgacgatttgatcctaaagcttcatgagcggaaaatgaaacttgtgatggacctcgtcgtcaaccacacatccgaccaggtttgtcccacttcctccctaccatgtgaatacacggataaggaaactaacatacacatttttagcacgaatggttccgcgaggcccgttcctcggtagacagtccttaccgcgattggtatatctggaagaaaccagtgtttggcgccgatggcaagcgtcagccgccaaacaactgggtgtcctactttggaggtaaattctcacacaatgcctcagtgtcttatcaagtaactgacatcgatataggcagcgcctgggagttcgatgaagcgtctggagagtactatctccacctttttgccacagaacaacccgacctgaattgggagaatcccaaagtccgagacgctgtacacaagattattcggttctggttggacaaaggtgtagacggattccgaatggatgtcatcaacttcatcagcaaggacccgttgttgccaaatgcgccgatcagcaacccagattctgagtggcaaagtggtgcacagtactatgcctgcggtccaaagctgcatgaatatctgcgggacattggaagcattctgaaagaatatgacgcattttccgtcggcgaaatgcccgaagtcaacgacgtgaaggaaatcctgaacgccgtaggatacgaccgtggtgaattgaacatgatattccacttcgaaatgtgagtgatctggcttatttggctcaaacacattggctaaccagctcgaagcgtttcactggaccacggaccaggaggtaagtttaccagcggtaattgggaaatgcaagatctcaaagccatcgtgtcaaagtggcaaacattcatgcaccaaaacaatggatggaacgcattgtatctcgagaatcacgaccagccgcggacagtttcccggttcgcgtctgacaaacttgaagaccggactctgtccgcgaagatgctggccactttcttgggcttccagagcggtactgttttcatttaccagggccaggagctcggcatgcctaatgtgccaaatggatgggcgattgagaagtaccaggatatcgaaacactgaaccattggcaagagtaagcatgtccgtctattccaaacacggtgcgaccactaacggatctttacagaattgtatccacgaagccggaagataatgatctgcactccactagtcttgccgaatatcggaagaaatcgagagataatggccggactcccatgcaatgggacgcctctacttacgccggcttctccgatgccaagccttggatctccgtgcacgatgactatccagtctggaatgcgtcgatccaggtggatgatcagcagagtgtatatcactactggtcgaatgttctgcgcttgagaaaggaattccccgatgttctagtatacggatcgttcgagctcatttcccctgagaaccctgacgtgtttgcctacactcgcacctccgagaccggcagccttgcgcttgcagtgatcaacttccgggctagcgagatatcgtggaccattccggaacaggtcaagaaactatggtcctccgggtcgattgctctgtccaactatccccagaacaaacgatctgtggtggatagtgacattgcccttgcacccttcgaggcatttttgtggttggcttaatatgttgtggctgggcaaaccccgaccatgccgtgaaatacatagttctttggggcttttcgtttcatgtgatcatcatacgttttcccgtaaattccctaccgtgtcattcgagcaattgcgtaaaactgtgggcctttttgagcactccaattggctagaaactccgtctaatagtcaagaagcggcccaaaaccagccccgaagaaggcccgtacctatcaagtgcatctccacctgaccagacctgacctgactgaccatcgcaccagacccgcgtggatttgcggggttatggctacatccaacggtggtcggtaaaaattgcccagtccttttcggtttagagagacaccccgcaaataaatatgaaagccgatgaacataactccgtaataagcgtacatttgcgcactgatcgggctgatttcggcaacaatgagtgcctctattcgacccacgcaacagcgcaccccggcctgcgacaattgtcgccgacgcaaggtccgatgtaatcgcgaacaaccttgtggaaaatgtcaggaggtgtttctcaattgccagtacacctccgtcccccgacggaaaggacccaaaggccccacggctcctgtgttaagctcgctgtcttcatcaagcaaccattcatctccacacacatcaagtgtctcgttcgcggcaagtgacgcaggacacgcagatgctgtcggtcctccctctgagtcaaatcttgaggaccaatggacgtttttaccaacgacagaatgcccagacacacgcttcgtgggcctcctcaagagtccgacatttcctactgcagcatgccagaggatatcccccgtcttgttgcaggctcatgtcgacatctttctcaaacatctctacccgatcatgccagtattcgatgccgacacagtgacagttgaatgcatgagccctgaagccctgtcaccgagacgatatgctttcatcgttgcgctgtgtgcggcgactcatctgcagctgaagcttgacatatcggagggtggcactatcgaagaactttcattgtctggccaaagcctaatcgagcaagccatacaagcgctacaagaattcgacccccttgacgaaccgcacaccgatacgctgcttgccttcttttttttgttctcggcgtacggcaacctggacaaacataaccatgcctggcattacttgagccaaagtatctcatttgcccacctcttgaacctgcaccaagaaccaagctacctagcccaagatcctgaaacggccgagttgaggagaaggatttactggctactcttcattaccgagaggtatgctttgcccctatactatatcctatcgcgcatacgtacttgctaactttgtacgacagagcgtatgccttacagcgtaacatgccaatcacactacgaggacgcatccagaagccgaccgtcttcacgtccaattcccctgcactggcttatggattcgtgaatttgatttcagtcttcgaaaagatcccatctagcttttacgactggaatgcgagtgccgcgggctctctcggtgactctgcgatgataaatcctatatatcaatcggttgccctttccacccctttgctggctgaatacaacgaaacccagaaagtcgatctaatcgtcacgcggcagtggctgcaaacacgtttatggaaggtagtaagcgatcaagtcgactcaacctgccatcagggagctgtcgtgccgttagatctcccaataacggcagggaagtccgtaatggctctgatgtcgactgttgcacaaaagtcagctgatgcgcatgggataggcatcgtaagtaattgtctcagcggaaatcggccctctgcttatcggtattgtaggaacaaaagctctacgacattggagagactgtgtcattgctcgcacatgtgttacttcccaggaaaaacgacggcgttggagagctattcgcgcacgcccaaaccgttttatgcggcatcatcgacctcctgtcgaatattcgcggaggacagtcgtatctattttcttcgcttcttcagcagtcccacgccatacttggcctcgaggccctgccgccgcacttagcgttcccttcctactggaatcccactctagctgataatgatggttccttgcccggaccagatgattgtatgtcactacaacgttacaaaacttttaaagacaattgcttcgacccgaaattgtcgacatgaaataggagtcgacaagcggaatcggtgagccattgactcttgcaatgcaaagttgcatatggatattcccctttgcccatccacgctacaaccaggaagctacaaccaggaatctggagaatgctttcccacgaaggttggctcggatttccaattgttaggccacaatttgccaatcggaatctcgagtctagtccgtggcattagttggctgagcgtgatccccaatacctaggtattcaagagggactaggacagaccacagagcagacgctgaagtggcgaagtgaccagtccgaggatgaggggggtttgagacggatgttgtaatatatgaattgtacgatatgatgaatatatgtagcaaccgaaagaggagtcctttcgtgtatatatatctctcttgtcaagacagatttccgtctttaagtacagaatgcaatcaacctaccacatgagaccgaaacattgaatgtttgttctaggacttaatagccagcgctagaaactaagaacgatcatcgaccatttaatgcaaaacggcctaggctatccgaacgaattgtctatgacgcttaattacattatttggctagtgaagcaccggctcagctccatataagctgtacatcaagaagcgcataatatcaaaacaatgcctctgatcattcctacaaccttgtgccttcctgcatgctgatgatcacgtggtgtgactggtttcattgcaaaggtgccccttgctacccatgttccccgaccaagaatgtcagattagagatgtcttcattaccacgtccgataagttggccccctgttggagatgttagaacggtactccacactcccttgccctattgccataatgttgcctgacgtttcaacaataacaataggaagacaaccaacccaacccactgagctcagtcgatgggtactcagacaatatcgcacccaacgtgggctattccagcgtgagggacgttcaaggccaactgatctcaggggggattactggaattgtggagctccttgacgatgggactgcactcaaggcaccatatccaggttctgagatcgaaaacaatatcatagatatcgccaaagaagccagtatctatcgtcgcattggaccgcataagaggcttgttcggatgctaggtcattccagggaaggtcttgtgcttgaatatatgaaaaacggtgatctcaagacatatggctcacgactcggtatcgacgagcctcaaattgaaatgggcgtaccaagtcgcagaggctgtcgatctcttgcatagaaacggaactatcgattgcaatatcaaaccacgaaatcttctgttagatacagccttcgacatcaagattattgacttctctggttcttcactagatggttcgaagccagcctctggtgaaggaacccgattttttcttccacgacattggagagagcaaccgacggtggcgacagatcttttcgcactagggtcgactctctatgagattactcaaggcaccagcccgtatgaggagcttcctagtaatgaggttgaaagattttttactcaaaaagagttccccgatatatctggtatagtatgtggacaaatcatcaaacaatgttggctatctcagattgattcagcagcggatgtgaaaactgccgtctgggatattatctctcgcacatccaaggttgactgtatccctcacctcgatggtttggacactgctcaggatatgttgattggcttggtttatccttagagttggggtagtcccaccgttctgtcttgtcttggtatacccgcaagttgtcaggcctagccatcctcgaccatgtacccacctccttgcaccgctacttacatcgctccttccagcaggttaatttttacgatattgtatttcaacatagcgagaaagtatgagaacagtatggggtagttccttacgatttttgtgccgaaagagtgggtaaagaaattgagcgaagggagccacgaagctctctgaatagccccttgaatggaaaaggactcagcaacagaggcccgaggtcgcacttggggcaaagagaggtctgtcgacctgcatgaggtgtaccaaactgcatgaagatagtcaaagttccgaagcatgcctgcatgccacagacgcaataataaaaaccttgttcaatctcaatgccatgcgaatccgagagctggccgagttgacagagctggaattagccgtcggagtataatttcagcactggttcttgtaaatgacagaaaatctgcacgtggaaaattgtcggcgaacggaagccgtgacgaatgagaagatgatgcagaagcatttaggagctgtcgtacgtcatggggtcttggtataccgagattttctcaacagtcattcgcagttggcaaaactttgtttcttattgtgaagagactccgaatcccggagtctgacaagcgggctccggggctgttcctgatttgtttcgggccttctccgggcagtttggtttgcggggaacggaccagggtggtttgcggggaccccacgcggctgattttgtgacgaacgaaaaccacgcttgcctggattggtacgtaggcggcttccattggtcattctcgaaggattggtttccactgcgtaacgaactatacatagatagcggatttttatggaattactcggaatcaagtacaacgtacgatggacaattcggtgtggtactctatgccgagaaaaccccgtcgaggacctgacgacgagtgaaatcgacgagataacccactttgacatcccaaatggtcgaaaaagcggagcttgggtgtacttttgatttgaaccgagccccctggaggacccatatctcatttgcaacataggagaatgaatgggttggattactggtaggagctatactaatcatattactcccttgctggaaggggctcttcgtctctgtgttagtaagagtcccattgttatgccagataagacgcggcatactacactagtactatggggtaattaatttaacgaacttggcattcgcgtaatggaatggctctcaaaccctcaaccgtcaatccctacactaagtatgcggtaggccccctccatggcatcatcaacaagactgaataataccggtcaaccgtcatatgccgcacgaacacctctcggagcttccggcataagctgatcccccccccttaatctaaactttcatctaatccaaacccgatttaattgttggttagatcaggcagccctattttaaaaaataataataaattccgtcttaatatgtaaaaataccaaaataaataacacaccaactatgcacgagaattcacgagtggaggcgggtgaatccttcaggtatataaaaaccgttgtataaagactgctttgcccccttgcttggatagaataacaatcaattcagccagcatccattccttcactatgattactctcaaatcttttctactccctgctatcgggctgcaaaccctagctggggcgtttgttctaccccgagaaacggattctacccccaatacacactgtggctcggatttctgtacctggtggcacgacacggccgagataaacacagccactgctgtcgaagcaggcaatgtccggcaatctcaccaatatctcgttcaggttgccgctgctgggtcgaacacctcatacgattccttcgtctacgaaagcattcctcgcaatggcaacggaaaaatccagacccccggagataccagcgacacattcagcggcgatgatggaatttcaattgagattgatgctggcatcaatatggcgtggtcccagtttgaatatagtgaggatgtcgatgtcaccatttcccgcagagacggtcaggatgttggcatggaccttatcattcggccaagtaccattgcgtatgaactcagttacgcggacaatgcagtgatcatccgtgtccctgctgatgaaaacggacgcaagttttccgtggagttcggcaacgacctttacaccttccggtctgatggagaagcttataccaccgacggatcaggggaagtcgttgggattgaacccatcaacgctctgctcatcttcgccagcccattcctctcaagtgatcttatcccagccagcgatggtgccgacaccgtggtgatgacacctggtgcattcaccgcaaatgacattggctcggcatctattgtctacttcccgcccggcgtgtactatatcgactcggaccctctgggtgaagctcacatcaagctcgatcctaacacctactgggtgtaccttgcccctggagcgtatgtgaaaggaggaatcgaatacaccactacagcccaggacttttacgccacaggccacggtgttttgtctggggaaatctacgtctaccaagcaaacgtggaccaaggctacacagcagtcaaagatgacgtgactagtcttcgaatgtggtggcaccggagcgtcacaagcggccaaatctggcactgtgtcggaccgactctgacttcgcccccgttcaacaccatggatttgatggatggaagttccgaccgagacgacatctcggttgatatctacgattacaagcaggtcggggccttcttcatgcagactgatggccctcagatgtacaccaatggcagtgtgcacgatgtcttctaccatgtgaacgatgacgctatcaagacgtattattctggagtcactgcatcccggctcacagtgtggaaggccttcaacgatccgatcatccagatgggctggacacctcgcgaagtttccggcgttaccatcgatacactcaatattatccactcacgctatcgcaagagcgagaacggtgttccttcggccattattggtgcttcgccaaactacgacggcagcgacaatgttgatagctccaagtcaatcagcatgagcatttccaacgtctactgcgagggtccttgccctggccttttccgtcttactcctctgcagaactataagaacttcagtgtaaagggagtatccttcccagatggactgatcggtggcagtgtccccgtcggagacaccatcattgcttctacaagtgataccacttacgatggatcgactagtctctccatggagctggacatttcgggatggaccgtccaagggcaagcagtgactggagacaatgcagactctttgggtcaattcaacatcaatagtgcctactctggacagtggtcaatctcttcttgattggtataagctatgcttgacccccttaagagtttgatacgctcatactcttctcaaccctcggtcactcatttgtatatatctttttctttttcttcctcagtttgttgatattttcacttattataaatccaaattattattccttgtcagcctcaattcaagatactcactctttactccatccttctgctcgaaccagatcatttccttgagcatttcctccaactgcagacccaaccttgtgacttgagcatcttctattacaaactccgcttttacgatgccatcactgccatcgagccaatcagtaagatgagcatcgaattttcggtcatcggacacatgctcgaatttcaaggtaaaccccattgagcgatctgtagcatcgatgaagagcgcatcatctctgatttggaccaataagttatgatacccaggattccagtagttgccagcgtaagcactgagaggcattgtcggtggctgcggagtatgcctttttggtctttgttcattcacttggcccttctggatatcttgactttttttcacttgggttttcttttcctgctttttcttctccttctttccctggttcttactcattggatttgcatctttcacctcggcctggggttttggaccgcgaattttaacaggtcttgtggctttgcttttgctgtcatgaggtctttcgtccatgactccaaggagattgtcaattagctttcggacaagggtcgccgcaacgccatttgccccatctgagtttcccatgatcacagcaccgaatgagaaatcagggagaaagaagaagcgacttccgaatccagagaataccccattatggccgacgaccatatgtcccctgtaaaagtagatatccagaccagcagcatatgctaccggtgaggtgtgccgcttccgtcttcctgggtttggattcacaaaagttcgcaggcgagtgagtccttcataaacatttttattgatagggtcttcgcgattcataaaagccttgacaaatttgatgaagtcgttcacgctcgaaatgacagaccctgcgccttggccttctgggcagtccggattttctaacccacgatatgttgagtcggctcttttccatgtgtagccagttgccatgcgggattcgaatccttttgatcgtgcgctgctgggttgaagagtagttgatgccatgtccagaggcttgaaaaatcgctcttcgaggaatgtaccaaaattctgtccgctcttgacttccacaagatgggttgccactgtatacatcatgttgcagtaaatatactttgatcgaatgggagcagcgacagggagattcctgaggtttctcgtaatggatcgagcattgtctggcttcgccgctcgcacactcatataagaatcgttatggctggcgcaatatcattagtcttgaactcaaccatgaaatttgaaaaaactagttcacctaggcattccacttctatgacttaagatgtcttccacgctgactccttctgtgtatccttttccagacataacaaagtcctcggggagaagagtcgacattacagcatcgtactgaatatccgggaacatgtcattatcggcgactagcaatcccaccgccgcagcagtgagtgatttagcagacgatgcaatgtcaaacagcgtatctgctgtgcaaggtatttctggatccaggctcacatgtccatatcccgcagaggcaatttgatcattgtgtatgattgcaatcgccagccccgggacatgctgctgatctatcaactctgtcacatgtgacgcaaaccctgccgagtgcaaaagatccatattgctgatttgacgaattaccggtgtgcgttactgaatgccactatagaggcctgttcatgtaggttccagccagtttctttgcgggaaaatacctcagttcaaaccttgaaatgacagatgccacctggcatgagaatgggggccggattataacacgcttggtcagctgcaacgcttagtgtgcatgccagtgccagatagctctcaacgttgggcccttcggatcgcctaaccggggcggtggggcttcaatccgactgctgcctgtttgaccatttaatagaaatatcacaggcacttctaagttgtaggacttcatacaatttctgtatcccatgcctaacaagaagactatattctaacgaaagatagatactcatctactattaccataattttagcccttactggagcaagagatgccaaattacctctcgtctgtctgcatgctgtcatatagcgccttgaacagtgatcctggccgttcaagcagctcacgcggtgggcctcaacgatacgccctttgtttggcaccacgaagcgatcaaggtccagcgttgtgtgtagcttgtgaacaacaacaatgacagtgcacgcctcaaattctttctgcagaacctcgtgtatcaaagtttccgtatccgcctcaacactgccaccaacctcatctataatgaggacgctgcttggattgattactgctcgaacaaggcagaacagctgcctctgtccatgcgacaaggtcccttcgttcatatcctcatccagcccgccgcgagactcgcaaaagtcccataggcgcacagactgaagtgcctgaactaagcgctcgtcagtagagaccctgagaggatcaaggttctcgcggacggtgccttgtaggaagaacggatcttggggaagggagttgaagcgagcacgaacggcctggcgagtgatggtgctgatgtcgatgtcgtcaacgcaaatcgatcctaattgaagctccagcatgcgcaggagagttgataccagggaagatttgccgctacctgtgcgaccgcagatggctacattttcaccaggtgttatggaaaggttgatgttcttgagtactgggtccgtggaagtgtcataggatacagtgaaaccgttgaatacaatggcacccttttgcgggccatttgtcgctgacatgtcctgtctcattgggcaggttctcgtcttttgtgtcgagaatataggtacggacacgactgatagccccaagagccatttcaatctgcgtccactcagtaacgagcgtctgtagcgaggtactgaatgtcacgatttgatacagggctacgccgagatagccagttgagccactgccgctgatatttgtcaccaaggcaacgagaataatggcgattccagcgataaatagatccagtaccattgtcagccatcgctggacacaccacagcagatattatggcttttatgacacgttgggggagtcgtggacggattcaacgtagtggcttgtccagccaaaggcccgtccagaggatataccacccaaatttccaagaaccgggagaagagaggcgccttggcttcaatatcgagtattcgcagctgtctggatgtgcgcagatatagcagctggatggccacgatgactacaatgcacagtgtaattgcgatggcgacgtagccagaggcgatgaataagaataagatgaccgccgacatgatgactatcatcgaaatacgatctttgaaaaatcgaaagactttccaactagaataagtcaataggtacaaagctatctgcactggatcataataactaacgaaaacaacttattcacacaaaggtaggttgtagcaagctacaacgttcttctcaaggtataaagtggggcggaaattaagcggaactctaaagtcaagatcaaccaccttcgaatgtcatcgagcaccaatgccttgattgcaacgctttgcttaaattatcagaaccctagagaaggcccaagagtacctgcaatcaatgatgaacaaggatcttttgtgccaaactgggctacgccccactatgatctcagtgactccagcatgacatcacaaccagcataccaagtataagaccgagctcttccaatggtaaaaaaaaaaatccatcaaactcctcttctattcaaacgaactacttctttacgatacttctcaacctctcaatccctaaatccactttatatctacacaaaatgtcgaactcaggtcaatccaacgtcggaaaccgcagcatctacgaggcaggcgaccagcgcaacgtccctgtatccgagctccaagagcgggcccgctatgccgagggtatgcccaatagccacaagcacctcgattctaaggacggccgctccattgccaacaagcttgcctctcaggagaacaagcctgactccacacaccaccacaatagcgagtacgacgctgaggccgagttgagcaagcaaaatcctaccaagcctgtaagttacatacaacttttgctcacatgaaacccttgatcaagatgcatttgctaacgcttagcttcggtacaggctaccctccacggcaatgctccgtccaagggtgctaagattgatgctgagctccaggctgatgatgagcagcgtctgcgggagaagggcattaagcactaaattcgataatgctgtttttttatgttacaaataccccctcatgtcttctgattggaatttgaatattcatcagcgggggatgggagggttcatggtggaacatgatgtacaataataatgatatctggtctaacgttatctcaaatgagtaacgggccattgaatgtatacctacattgatgacaagacagacgggcgttgaagatttgtagcttgtatacagtatcttgtagattttgaagcaattgaagcacgtgtctatgtggttgtctgggtgttcgcaactctgacccgtcgctggttggatgaccaagcataatttaacgctatcgatcggaatgcacccgaggtctgcgggtcaaattcttcatgccacttccacctgccaaagacataggaagtagcgtcatatatcatttacactttcgtacgtggaagggagaaccggtgtaatattttacatgaagagggaaaatgtggtccaaatccaaatataccattgtaaacgtatgaataaatagaacatatgtcgtgagatcgctttcgaaacacaattatacgatatgtacgagacagatgtcaaggcgaagctattgtacatcatgaagtatgacagcatatacaaagccaaacaggcaccaaatacctgcaacccttccaatagggtgactgacttattatttagccaaaatagaatggcttggatgatcgaagagccccactgccaactaagacagggcttatccacacagataccgaggccatagcaggcgtatatccggagtgcagttggatataagccaaacatcggaatcctgttcggcgagtggagtggaggggaggagaggggaggggaagctgactggtcgagaagcgagccaaggcacaaaatatgccagtgagacctgagatcagccatccagagtaaacttggggtcatcgtcatgcggctcggcaaagacatgaccccagtattcctcgactctcttgcataggtccactttgttctcccacgttttgaacgcagtttcgagattgcagctcacccatttgatctcctcccagtaagccttttcgacatcgtatccaaatcgcttgatggtctctgggggtgccaaccaagcgcgtccatctgagccgtccttctttaaggtaggagttgtttcccatcccatgccgaagatccggtcaccggggttgaacttgggatagtttgcgtggatgaagaagacgtgcggtgcgggggcaaccgactcgtcttttacacgccacttgtcctgctggatcaaggcaaaatcctcgcgcggatctgactgtgccatagccgacccggacagcccgtccgcgttcgcgtgtccgacagcctgcacacgttcactgacagtatagaacggtgcgcctacggctgaggcagcttggataaaggtttccttatctccctcgccaggtgccccttgactcaacaagcggaaataatgcgaggggccgtaaaagttataatacgctgccagcaagagcgctagagagtgagttttcttagatactaagaaaaccccggtttctgacgactgtctggcagccatggacggtgcctgttggcgtgaaattttgtagtacaagggagatgcggaggaagcccagaagtcgggccatgtgacaagaccattggttttgaatggctccgagtcaagcaaatcctcgggtttaccaagagggaagcagtcggcatccatccagactatttcttcaaaggacgagaaaagaaccgcgaagatcttgagttgatagtgttcaatgatgtttttacccaccacgtccgccagcaccaagcaccgcgcatcgagtttaggaagcacctcgttgcagatttctttctcgtgttcagtggcgtccttcatgtagagttcaactggcaacgttgaccccgcgcgacggagcatgcgcaatgatgagacaaacaccgggaggtatgtagagccagctgtcgataccagtcctcgcttgcctggggtatgaatcggtttcaactccttgtctgactgcttgatatcctcgatgaaggccgcatgggcttcctccatcttgcgtacatcttcatcgctcaggcccgtcagatcgggtcgcggcacgtcttttgtggggtcaaagtgctgggcttcgacatcgcctcgcttttccggggaagggcaactcggcttgtggcgttcaattatgggtcgaagaactttccagaagtccttctggcgttccgtgagtggaacctcgaatgctgtgtttgggactagggggacgttggaggacgcggtgattggggatcggtaaaagtagacggtgcacactagaatcagagcgagcatcgctagtacgagcgccttcgctctcccaggtcgcaaagcacccattattgctagatagttcggataactgcgcttggattcaggggttgaaggagcggcgcacgggcacgccgatcgacttttacttatcaagtgaaggaataaaaaggattcatatatgtattgcccgattcacagaatgtgacgaccggaggagttggttgcagagttgtggcgcatccagggagtccgggcggaaaagaagattaggcttggcaaccttagaaggcctcaacggcctacgtaccttacgacgtacatgcacgagttgctggaccagtatgtctacatatattgtcctatataatcaatattggatcctttgaaggaatcaatatcggacatgagacacgagaccgctcgaaatcccccgattgtacccctgaaagccgaggcctgcccaggtgctaactagcattgaggccacatgaaagatcgaatcagaacaaatatcagacactgatatttaaccactcccatattccaatggtatgaatgctttcatgatcatcgtgggaccatttgcctttaaaaggcgtccccaatccacgtgggcaggtcgactaaagcgcggatcagcctccaccggggaagatcgcatatccaccccccaacctttcctccgtcatattattattccttctttttgagtcgaaactcagagagtctacagtttctacttaaatacgtcttccccccaccaaacccccaaacccctattggattcgccgatctttcgggattccatatttccgccccaattacgaatctacggaatctacccgcacaaagtaacttacgccccgtgaacgcccattatttcaatcgcataggtctttcaggagatcttgacggatggactccatccgggcattgcccacgccagctcaagatggcctccgataatgttgatagtcccatgcgagacgccgcgcccaagggaaaatcccgcaagaccgacccgaacgctccgatccgaaaacgccgcaagagaaccgtggtcagcggagcgtccgacgactgctttgcctgctccaagcgaggagcacgatgtgaccggcgccgaccctattgctcccagtgcctcgaccttggccgcgaatgttccggatacaagacgacgttgacatggggtgttggagtcgcgagtcgggggaaactccgcggccagcatcttccggtgatgcaatcggaagcacagtcgtcggggaatgcagcgagatcacaatcgaaggcctcaaggagcggtgacccgtcttcttcacggatgcctgataatgcttcggcgcctccgtccaccggccctgcaatggcatcgtttgaagcaaggacgccgagtgtgaaactagaaggtagtccatccatgatgccagctgccttcgacatgtcttcaaacctagcttggacaatggacatgccagatccacaatcgtggtcgaacacgcttgctggtccgcctgcgatctcggggcttccgtcacccagtcggccgatgattccaagcaatacgagccaaaatatgacctcggagccgccattgctgtatgctcccattcagagcccgacggctaattatggctctctggtttggccgacagcagttcgattttcatctcacgctgctactcccccagcgtcacaagccgatgaggaggatgtcaaatacgatcctaattatcatgtgttttggaacgctgcccattctccgtcactttcacagctccttttggcacgatccgtagggcggaccccacgtattcgttatctcatcagttactacgctgaagttattgcccctatgattgttgcttttgataccccaacaaacccgttccgaactcacgttatacgcttagcaatggagagcgaggctttgcaggaggcgattgcaacgttggctacgagcaacttgcgccagaggcgagagcacaatcatctctccacggaacgaactctgccggcacgtatgtcatcaatggctcaccgcgccctcaccgacgaagatttccaagatcgatatggcatctccatggtcgaagggtacatcagagaagaaaatcatcatcgagggatggccgtcaaggctttaaatgctgatttagccgaccctcgtcgcaggttatcagactccgtactggcaactctgttggtgctctgtcttttccatggctgcgatactggcgttgccggattccgtgcacaatttgctggagtaacaagactacttgcgatccgaatgcgccattcccgtgtcgtaacggatgaactaaaatggttcatccgcatgttctcgtggtttgatacattgacggcaactacaaatgaccgtgatgtgcaactccgcggaacatgtttggaaatcagctccataaccgatggagaatggggtctggagaacctggccggctgcgatggtcgtctgttcaagctgatttctcagctgggacgattgaatcttctcagccaggaccaggagcccaacctatcgcgcccaaacgatgctggtgtccccactgcatcccttcctcctaatatgctgttcccgggatgggacacagttgtgcccaatacaggaacgggctccgtaccggaatacggattttctcttcccacaccgccgcaaagcagtgactcatcccatcgtcctacctctccagaattctggacagagtggtattcgctcaggcagcgactcgaatcctggcgattcgacccacctgctcatgcctctttcccctctccgcccttatctgcatctgcaatggcctggaatgccacgacttatctgacgccacggacttcctcctcagcataccaagtggcacccgagaatctccaggacgtctaccagatctcggagtgttttcgtcatgctgccctgctctactgcgaacgtctagccgagccgacccttccatcgtctcatggccgtattcagcaccttgtccagctcgccatgcattgtattattaccgtgcaatcggacgtatatcttctctggccactgttcattgtcggctcggagtgtgtccaggataatcaccgttcgatcatccgcaatcgctgcaaggatatttccaaggactctggcttcatcaacaacctttcctgtctagagcttctggaacggatatgggctgagcattctgatgaatcttcattcccagtctaccctagcgggttgggtcccccgcctccgctggctggcggcagggcaccatcacaagccttccgttggtcgcgagttatgcaggccaagcggggtgatggtgagtacatggttgcgtaggcggtttgccttctatctcttttaatttttttgcccgagctataagcttccggtttccagctttacagcattctggtgggacgggcccattggatttttctttgttcgaggatcagcgactcgtgtcttcaaatgataccattcattctatattcagcaatattccccaaccagtactatctacattgtacatattggctctttttttttctgggtttgcttcgggaaccagccttccatacatatacctacaaaatcaggataaccattcaaaatatagaccacgtcataattttatcaatgaaatgaacctataagacaagcaatttggacaaaggtccttcgtaatacgttgtatggaataactaatctacgttctacaccaccaaggctcaagggccaaatagggcctggcccaagccactcggagataaccaaccccgagtcatccccagttgatatgcgcaaaagtaaaactgcgcaaaaggacgaccacataacaacccaacgcaggccatctttccctatcacacatctcacggcgctacgacaaaagtaccaacccacaccccaacctagacctataagcgcttagagactacattatagggcacagggcaagggcagccacccaaaccctataagatcagcacgcacaatgaaaacctcgaaagtttaacacaaaagccggatagtatcaataatacacgtactaatgaccgtcgaagatcttcccgaccgctagtattccaaccgggcctagaatactcattacaaacactaaaatgggttcaaggattcgttttgattctcccgcgacaaagccgatgtccgctcgtgcaaggggtggcagattaatatgattctgttgcgaaccgtaccgttcatgtgatattattgatggatcttatccagagcgtgcatgtttaattagatgcctagggggtaaggaggtaggtaggcataggtgcttgtaaatgtaggtgaagggttgttatcattaccgctccctgtacttccggacttggcggacttgatatcaaaagcaaatttaccaatcatcgcacattgaaatcgaggaattcagcagtctgtaatcccccgtacgaagtacagggtacccacacggcatctaggcgtccaccccctatatgtatctaaaacctgatcgtctacggagtagcaaggatgttgagccgttaagccgccacggcttaatacactatgtaaccgtaagccgtactaagcttagatactccatactgtgcgcatcgcacgagaagcacgggatataaattaaaaagagccaattatctcgctcagggggggggggaaccggtgtacaaagatgtgtgtgcgtgtccccgtgcgccagttcaaggttatgttcctacagccgagaaaatatgcgtcccggcttccagcccgttggccccctgcagccttgttagcgggcttgttggtggattttgggctttaaaccttgttccagaaattctatcactcctaggcgagttggcattacgcactaaataaattaaatggtacatggatttgttttctttctttttgtccgtcctcggctgagatcagcttgggtggccaaggaggtgaaaataggggggggcgatatcgagtcagatctgttagacgtcggattatctatacaacatagacagatacgtctactccgtactccgtatatattttgtttttaatatgcctgcatgtgagatctatcctgcagatacgatcaaaaatatgttaggtaggcgatatttcctttttggaaaataagtaaaaataagccatgtgcaaccctagatgatcggcagtgcaggacggggtttggccttctgtttggctggttgattaagacaaggggggaatctcgaagggttgactcattcagaaaaacaaagccctcgaatcagggatggacctgggattcttctgtgtgggcagcaaggacgcgctggaaattccgtctttcattcctttactcggtgcgtgagcgtaaaacctatgttgtatttatggtatttgtggctgagccaagttgcagtggctctgttctctacgttgaacatacagaggcatgtgtcctgtgtcctaaaatagagaatagttgtagatatcgttgcagtattagtgtgtagtttatagttctaggctataactagcactgccagtcatgacgcacaatgtacatctgatagcgttggttgggtcagattagtcccaaaaagtcagactagggcttagagttgattgtgatcacaacgatagcgagtcgcctattgttcatcgccccacgctgaaacaatgaactgtcggcggccaatgtcaaaaattgatacatagcagggtagtgatttagaagtgacttcattttgcttatgttggaggacactacttcattatgcggcttcaattcctaacgtgttgtacacagccgctgcgcatcccacgatttcttacgagtgcttggtaataactatcctatttttattactctgtacgaaaatcttcatcccactcgagctattgacggccagcaagttgcggtctgcaaattctctatttttttctagcccgaaatggcggttgctgcccagcgacgcagcggtaaagcctgtgcatgacccgtgatgtcgcccaagatggcagtgcgaagtggatgtgtgtgtaaaagatatacagatggggctcattggccttttttgccatggcaacgtgttcgtatatgttacatagtacatagtatagagtacggagtacagagtaataatatctaaactgtttggagccttggaggttagtggagtctgaaccactggacgagacgggatgggccgccgtgacacctgggatgccgtcggtccaaccatggaaccgacaattcatacatccatgcctacacctggtacaacataagtacttacatcggtcccggggtgattaccactattagaggatattgcttcatatgctcgagataaggtatcattctcccgtatacagtattctctattttgctgcaactaatgatggcgttcatgcagatgaactgacggggcatggaaaatgtaagcccagttctggaagtcgagcacatggtttgcgctcatccaacccaaccatgacacgccagctgatggaggggtgatctaatcagtttcagcgccagacatatacaaggcagccagtaagatctatcatggaatgacgctatgtcttagtggcaacagtcacgccagtttttttctttacctcagagtgactcagtccaacaagagcgagaaaaaaaaaaacctcgctatgcagctgccttgagactggcaaagttaaagacaccgaggaaaatgcagttgtccgctgcccgatctaactgaggggctatcagccaagcggttagcatagcgtccaatggaagcatcttcatctggactagcttgaggggtagagacatcgagacttcttcatggtactttaggttatggtggattcacgagtgtcgtagaatgtaccagttcctcctagagtagtgatcgtatttccaaggttgccacataaagttgagtcataatatgtgatggctgagctcgagcgcaaggtataaaagagacggattatcacccagaagaaggaatagtagacctaaattagaggaaatgaatagaataccttgaaactcgtgaatttcaatacccgtaagaaagaaacctaacgccacagccacgacgccagctcacacgcgccggctactcgctgattggccagcgcaaatatcgccggcgctgacattgggatccatctgtcttttccctttcatcgggtcgaattttttccctctccactctccccactgaattcaaagccattacaccttctggagcggatctctgctctttgttttcctcaatccccttttatcaataggagatcttgggtcctaggatcccctaaacgcactctctctcttttcctcggattgaccgaagaacgttcaaatgctctctcagcacattcagttccaatcctcctcttttcgatccaaaaccgtaccacggtgacggtcctatcaaaaaaatcctatctggcctgcagtcttaaagtcggcgtcgattattgtttgggtgcacgatatcctgtataatatactcggtgttctttttttttcttgctgatttcatttaattgcctttggattgtttgcattttcggcttgtcgcctcccatttacatttatctgatcgactggtgctccatatgctcgtgcgataatgtatcattactccagtccaccacccgggtggtcaacctacgactacacccaaactcaatcacctcccacctcacctcaatacgcctactacgcctctcagttcgccaacgcctacacttcaccccgcgggacctcgcgacgacacaaccgcaaagccagctactcaaccaccaaagaaacaccatggtattcgtcgggccacccacaaggctactatgaagcaactccagactatggcattccatcgcgaaagcacgatcatgtaagtgcttcttttgcgggaaagcccaaacaccaccgatactcctcgaccggtcaccctacgggggatggcctcggcaacggataccacccgtcgcaatcgcaggctcgtcccatcttcgtagatgtggtcgacgaagcattcgatgtcccgcgcacccacgttcgcgaaccccgtaccggtcgccgtcccccggcctcgaaccccactcgagatggccctggccagcaccgtcgcactacctcgacctcttaccgcaaatcaaatccagctgattctcacttttacttcactcaggctcctaacggcgaggatatcgatgcggccagacgttcccataccaggcgccaatctacatcaactcgcactcccaacaaacccaaaccaccgcctgcttctgccaaaccgccacccaccgccaccgaagatgacgccgaggccgcagggatccctccaggatattcgatcaaaaactgggaccccaccgaggcgccgatcatcttgctcggtagtgtgtttgatgcgaactccctcggcaaatggatctacgactggactgtcttttatcatggcgcatcgacgcccatggccgacgtcgcgggcgacttgtggctattgttgatcaagctggcgggcaaagtaaagagggctgatgaatgtctccctcgcatccatcgcgtggaggcgcaggaagtcgtcgaagacttccttgaaagtggcgagcgcctctggtcccgattcaagaagctcctcaagggctgcgaactttacatgtggaaggccgccaaacgagaaggtggcaaagggcccgtatcaatgggccgcaatgcaggttgcgaatttgtcgaatcgattttcggtcgcgaccgtgagcttgaaagtaccgagaagctcatgaatagtattcgactctggaatatgcggttcgacgccaactgcgaagacattctccgccgaccgtcggctgcatagaatgttttcttcatacgttttattttttttttcactagcgactgccaagggagcgatacccccaaagagacagattttcctaatactgcttttcttatctacatttggagcatttgacacttgttgaatcgcatttggagcgtgttgctttggcttcggctggctttgctcgtcgcatttactgtttgttttttcgacccatgggcagatgttgcccagggtacaacacaaaagatcattgttattgttttgctttgcttttctggtgccggcgccttgatttgacctcgtttctttcataggacggcgcccgttttatccattctacttcattcctggcgtccttgtttaatctttcaattccggccgtcaagttcgttctgtcttgccgttgaagtccgtgtcactctgctttgatgataccatcttgcgatttcttatatacgtgcttttctactcttgtctcttatttcctttgtccttcgcattacagctgttatccagctatttttctgtccttaatgcttgatttgatgttgggtcggaggaaccgggttgtacatagaaccaacacgacccaaacgtccgatagaccaaccctaacgctcgttatacttttctattctatactttccgagatactccgtaacatgtaaaatgaatactatttccacgtagcccaaatccaccaccaaatagcctgtgatgtgatgtgatgtgatagccctagagctacccctcaccccggcgcttcctgtgcaatgcaagtacgtacatcgcacattgtggatcactaccccgccctgtaagaccatcgaaagcgtctagaatcaccccgggggccgccgttggttgctcggcttggatactaaatagctatttgatcattcactggctgtacgccctccaaatcaggtactatatctccaatgacggcagctgatgtcacgtttcatataagtgtaggtcccagcgttggatcagcttgcatttttctcatgcaggtgatcgcagctgctattggcttagatttcgaaatccaaccgctgcatgcacggtggttggcggtacccgagggtgtggcggccctatcacaggtgaggcacgggagtgtgggggttgcgtgcatgacttgtggctttggtcttgggttgcatggtgatcctggatttgaggtgttatttagaatgaacggtggctgttactatttatagttatggtggttgatattgaggtatctggtttagtatgaatgtaggctttgggggatttgatactcttgctgggtatatgtgagcagcagttcttggcttctatactgaattagtcttggcttggacttggcttagacttggctgacttggttaataaatctcccccttggtttggagtcatactgtgcttgtgacacgtggctccgaaggttgaactgtagaaagcagccgagcagctataccatatggaaactcctgggagttgacatgacatggaaagctcatgacagtctgccatggtataaaagcataaacttagcaatacttcatagccaagaccatggaggtggattccaagtccatgtggccatgcaaccttatttgccatatcagacctattttctctcagacttgttcaaaataacttctagaatcaaatttctgcccaggtgtgttgttaactgaggtctggaataatgatgacgcacgtgggacggtcacgggactgccagctgactgatcgttgaaatcatccattccaaggttttctttgtgaagtgatgttgtagtgctcgaaccatcgaattaagatgattaggtgatatattattatttcgagttgatatttttcggagaattgcttgggggtcaacaactaccaagactcatactcgtcttctccgctgtcctgatgcaatctcccaaggacagatgaggatgtgactcttcaagattcccttaactcaaatatctagctcctggcaatttacctgattccaagtatccgaaggatttggcctcagacctataagggtcattcgacttcccgatctgggcacatggctatgctagatgaatatctacgacagttgcgatgcctacagacgaaaagtctgataggctatcaccatgggaatggatccggagtcagattcacatgaggccacctgaagatgacgaaccgcagtggtggtggattgcgtccacgaccatcccgctaattgctgctacaacgggaccactcgccaacgttatgtcaatcgttgcgctcgttatgccatggcgaagcaaaatcctctcggaaaatcaaagtgctgctggaaacttcattcaagaaggatatccagatcctcattggtgagtacgggcgagagggcgttactttggatcggattgtctaacatcacgaatagggccactgttctaaatgccgtttcgcttttctgcggaatcgtgggcaatgcatttttactgttcaatttcacacagattgtacgctatattatagccttgcccgtgacgatcatttcgtggttcctagctgcgggaatcgtgagtaacttctctagttttgtatgtcccagacctaacgctcttttgtagctctgtggaattaccatagccatgcatatatatgctcctccagtaggcactgatagggtctactcgcaggcgtattggagtgccgtcattgcggcagtcctctattttctcttgggcgtcctcttgatgatcaacatgctaggctatttcctgggtaaatacccgcaacatttctcgctgaccaatgagcaacgaaccttgatcctacaaatgactgcattgatggtttggctattaattggcgcggctatctttcaacgggtgatcgggatctctttcgccgatgcattgttcttctccgatgtcactgttctcaccttggggtatggcaacataatttccaccaatgccgttggtcgaggtcttatttggccatacgcagtcattggaattatcattctggggctggttgtggaaagtacctttaaatatggtcgtgaggttcactacgataatgtgatttggaaacacatcgaaaagaaacggcaatccactttcgaacaatcactcatcaacgagctcgagtctgctaaagataaactctcgcctagcggagttatcacccctccaggtctcacccgccaaaactccaagactcgacgccatcggcatcaccggccaatccgcaacaccatcaacgctatagccacggctcgccgacccaagattctcattatgcgtgaagaaaaggatcggtttgatgctatgcgccgtattcagttcgatactatgcgtttccgtcgctggaacaatttgatcatgagcgtcgttgcattcggaattgtgtggtcctgcggagcagtggtgttctggaaattagaggacattacctactttgaatcactctacttctgcttcacctctctgttgacgatcggctacggtgatatcacaccgcagtcaaatccaggaagacctttctttgtggtatggtctctaatcgccatcccaatcatgaccatgcttatttccgagatgagcgacacagtcgtcgctagcttcaaacgcgccactgaagtagtcgctgattacgtcgtgcttccccaatcccatgtctataagtcatccttgggtcggattcctatcgtttcccagttcttgctggctcgccaagcgaaaaagcaacgaagacgcggtttcccccttgagggggatgatggatccgacactggggaaagagcgaaccccgaggattctagtcaacctaatattgaaagcggtaacttggccgagtctcatccgcaccgatcccttgaagaacttgtccgggatccgaccccactcgagcttgcccagcaacttgccttcgctattcgccgcgcgtcgaaacaagcactggaacgcaagagaaagcgatattcctacgaagaatgggtcgaattcactcggctcattcagttcacagacccgcgagctcggcgaccatcgtcacagagaaaccagccagcaagtgaggaaggcccttctaatagtgaagacgaatatggaattctcaattgggactggattggtgaaaacagtcccatgctggcaaaacagacagagcccgagtgggttctagatcggttgtgtgaaagcctgattcggtacgtgtcgactcaagagagtcgggctgtgggaggtggtgcagatttgtcggaggagccaactctgaggaaggagagggatattgggttggaggagtgattttctgttttattgttgtccacgggtacatattgcttgtattaattcaatgttagcacaggccccagggaacatattcttccaaaagaggaagtgggtcaaggtcacatgttggtgcctggatatttgtgtctgcctggagatcatggccacaccacgcagatagttaagagaaggtgtctacatacacgtaccgactgcacagctatatgctagatgcaccctccatccacacattgacatgtcttccttcatcaggccaagccacagtcatcatcaggcttagtagagtccccacatacgtggcgtggggctgtgtacatccgtccattcaactacactctgtcttacatctgccagcttatatcaacaaacaatatttctcccttcgctaataaaacccccatcaaatatgacagccaacatccctgaaatcctcctactatgcatggacatcgacttcataacagccttcaacgatgcgcttaaaacaacctggccagatcacaacccagaaaaactaaagatcaccccaataaacgagcgcctcaactccctcccagaagcaacaacctttgacctaatcgtctcgccagcaaactcctacggccgcctcgacggagccttcgaccacgccatctcaatgaccttcagcccgcgaaaggactaccacgctctgacacgcgcagcgcaaaaagtgctatatgagaaatggcgcggctttgcgccacccgggtcgtgcacacttgtcgagttcccggatgacctaaagcagaataaatacggctgtggatgggtggctatttgtccgacaatgcgtgagcctggagatgcccgctgggaccgggaggttgtctatgagtgtgtgtggagcttgttgtgtcaggtcgaggggcataatcgctctgcggaggagaaggagaagattgggcggattcttatgacgccgttggctgctgggattgggaaggttagtaaggagcgctgggcggtacagacagtgctcgcgctgagacaatttgttgacgctattgagaggcctgcgaggtggggtaatttggggtgggagcatattgacgaggattgtctggaagttgagaggacttggacgttgtgagttgtggttttgactggccaagattcctatgggatggtgttgggaaatgcgtgtcaataagataactagctttgaagatatcccagagctatatctctcccactgtgcttctgtaagcgagccattccttcggttcggtccattttagctttcaatttgtctctaacattgcagtggagcggatggggttcgagggcgaagaatgcggctgcgtttcgctttcggtagtggtagcattgagagatacacaaaaggttacagttctgttgtgttgtcaagaggtgggattgagtttactacattcctatgtctcagtggccatttcgtactattgtctacataggtatgcatgtctttttgatacttccactttccctggccactatttaacaccaaagtatcacaatatttacccgccaaaaaggaggctctagccattccaacactttgccacagctctacggagtacataatagcccattctttatcaatcattgatcgacccaggcaaaactgccacggagcggggcgaacccacgcttggaatgtggcaaccaggcaagagaatcttggtacgccatgttttgcccgtttggtgaagaagctgtgttgttttcgtggtatgcagtatgcaatccagtgctggaaggatctgatacatttcagagcgcgggtacttgcaggatggggtattggcagcatttcccatgcgaggatcccttcctgtcaggatacgatggctgatttttttcgatcagatagaatgtcgagtcagcggagtttaaagtaaacactagtgtcttctacctaacttggtgtgtgcagatcagaggtttcacagcatacttgggaatttttgccttaagcgcataaagcgcccgtttttttttacttctgtaggaattacattctgtgtggacctcactcacagctcatatttagtgcaggaagcccgctaagatggagaaatacatacacccactggccaagaatcaaatacttgacctcacccccaagttgtacctagaccaacaacacacataagatgacaatccaattcccaatcatgccattcgactatttccaacccagcccagccaagaaatttgtctctctcaccaagcactcccgggtgactggggcaaaagtcaacacggtgtttcacgagctcaagccacttcagccagacgacttgatcggcgaatgggacggatatatccttgccacgggtcacccattcgagcacgtgctggacacgctaaattggttcggcaatacattttattccaccgacgacgtggcaccactgatggttgcgcggaacggggaacgggtgccctttgaagattgggggcgtgcatccgtaagtcatttttctttaatttgtgacacatttccaatgctgcatggctatatgcacgtgtggttgtggttctcgaaggaagcttgtatgtattttgactcgggagatcaggtctgacattcttttcttgacagctacgtgaaatcaaatatcatggagttgtctctgcagctttgatttacgacgagcgacccatgatggtctattatcgagctgtgaagcataacatggtggctggatgtattgagagtaaaaagtggcaggggaaagtctacttctatttgacgagataagtagattgttatatttagtatgtagtccacaagtgttggcttgagtagggatattgcgtctattgcttgagcgtgattgtataactatatcagatttatgaagtggttcctcgccacggcagtctgctgttgaagattcaacctttgccaagcagcttggctacttttatttggccatatcagactgcataatgtaatgcagaccacccagatgtatcagtctggttcggatcgtacaccttctctaggagagcttttatattttcgcaatcaccattagcgacagcttttctgaactctgccgataattgattcatcccatccggtatagtcaggtgtcttcaattcactccgacgtttcctatattgcggatttggtaacccatttctcatgtccttgatcatgctctgggcactctgcatgtagtaaccaagccgttaatgggaggggaaggacaagtcaggatttatgggcgtgcagaatattcagggagcattcaagtgaataatgggccgaaggccctgaagagtaagcggcaagagggacttcgaacgaatgataaataaaatcatacaatagtgaggattcgctggtggtcaccgttcttacaccgtcatttaaaccacctatcacctaactagttaaggagcgcaagtttacatcatcgtgagtccaagattggaattcgcgatttttcctttgcatgttttacccaacaactcgcgaagaaatcagagttctatatcatggcgatccattttgtctacaatggactagaaaactttttaaatgtctcaaggggccaaaagctttgcgccgagcaggccggattcgattgattggcattttcagaagtcgagcataacttctccgggaggggatcgctaagaaaatggaccaattactgatagtcatggtggtagttacctaggtaattggatctaaggcggccattgcgaccacatctagatccatggatgtatccatggggttcaacctatccccacatcataattcactctacgcaaaactcatcgctgtccaaccactatcttcgaattgttacaatgaaggctcagacagggctagaagtaacccttctttcctcgtctaatagtctttccaatgttcggccaagtgaccttgagtcgttgatcgatgaagcgattcagacctgatgggacgcgcttgatcatcagagtcaaaggacaagcaaactttctcatctagatcctcccaaccgtcgacttatctccatttgactcagacgatgccatcaggcagtgtcgcgactttctcgtcgatgacaagcgatcaacactgtccattgtctttaagggttcgggactcactgcttcacggaacgacgaggacattactggaaaaggcccataccttcttgtggctacaaggttcatggggcttactgctcaatctacccggctcccattcagtagagaagacttgatgaacgtgcagcccgtataattatgcaatatatatgacacgccagtataaaaggtacctcgatatgagattatttggggcatctaccttttatatgagcatagatacctaattcttacaatttctgtttagtgggaccggaccgcgggacccaaagtcacctggacagtcaaaaactaaggggcaaatcagtcacaaggcacattccgacactagcaagaaatactgtttgaccggatggaaaagagaatcacctctacaatatacacaccgaggaatacatcaatcgctcaatgggcactcattttggcttacggtgagcgatatcatcttggtacaccgctagatatgcctgggattgaccttgtactataatcgcagagccgggattgcgctattatcatcagtcccggtctggagcagacgggtaatataaagaggatgtggttggctgtccttaattcagccctatccgatactacgccagtgctctccactattgcgtgctgactatttatttgttacgactttgagctcccaggcagcagaatacaagggggtcattagttgcaagatttgcaatatcatatcaagttcgccctgaagcagtcggctattctacctgtctacttgtttacgtgcagatcgaaaaaagacagtcggatcacaaacgccgaggaattaacttttccccctcggaaagtcgcctcgtgccgaccacaggaacgcgaaaattctgtcaggctttcacctgcgaacatctatcttttaccctatacgcacgacggagtacactttcatactcgtggccattcagaccctgtcaaaatggagaagacagacgccgcggctacacccgatctcgaagccccagacgtccctgccagagaatccagcctcgcccaacgatggaagcagaacctgacgcccactcacgcagacttggtctgtctgctcctcactttcctcaccggtctatgcgatagcagcgcctacaatgcgtggtcctgcttcctcggaatgcaaaccggtacgagtcatacccgccgctcccccgcaaagggggcgcaaaccccaaaccaacaaaaaaaaaaaaaacaaaaaacaaaaaacatccggaaacacaatagaaactaacaatcgctcctcaaaacaggaaacaccatcttcctcggcctcggcgcctccaatcaaccaactaacaagccatggggctggctcaagtccctcgtctcgatcgcgtccttcttcttcggctcgatgatcttctcgctcgcgatgcgcaccgtcggcgccctccgccgcggaaccctcttcatctcattcctcgtgcagaccctgctcatcatcatcgccgtcgccctaatcgaagccgatatcatcccccacacctcccatgacgccaccctatccggtggcccgctgttcctcgagttgatcccgatcgccctgctggctttccaatccgctggtggaatgacgtgcagtcgtgcgctgggctacaatgagatcccgaccgtggtcttgacgagtgtctactttgatattgcgtccgatccaaagatcaccgataagccgacgacgaacgttaagcgcaaccgtcgtgttgccggcgttgtgtgtctcctggtcggtgctattgtcggcggctggctgagtcgtagcagtggtggtatgcaatctgcgctatggatggctgctggtttgaaattcgttgctgcgattgcgtggttgttctggaaggctgcgccggcgaaatagattcgcacggctgttcagtgagttaccttgttctggtgttgtagaggtcgagtagattacaatttatagttagttgtgcatatatcaatgttaatagtttctgatcctggtgttctcgtgtctttggtattattcactctctctcaacgtccaatgtacttgatgtattatgttcaacaatgtctagacttcttcctggatatgcgggtggctgtattggctgttatcctagtggctacagtggtggatcaattcgatcccggagatgttgatgtcgccctggtaatggcgatgaccttcaatggtgttttgatgcagcttatcaaagattggatgaatatggaggcatcaatcagggctgtgtgccgagtgaaggtatattctgactcgatggaatctttagaatgaacactaacaatccatttttgcagtgttgaaacgaggccgagaatatcatgcaatgcaagaagtcatcaacagattcaacgctgagtttctgactcatactgtcttaacagttgtgcatcggttgaggttgatcaaccatcctgtgcatagtagatccgttttaaattccacaactgccattcagcattgttctcagtattttgaatcctgttccatatcgttgcccaatgcgcttctggtttgataatggcaattttttacatatcgtgagattcaaactagtcatgagttataaaggagacaaggtacatatgagccccgctacaggccaaacagtccaccgagtatgatacatagcgacagaaaatcgactcgtagcattagagagatcaagtaagagattagcagaccttcaggccatgaatgaccatactaaaaataataaagggattccctttcttaactcaagtgggcttgtgaatagttaatgttggtgagagaaggttatgtgacgcatgatcaggtacaaaatgcaaacccttccttgacgacggaagatgcgtatgcaatccaatacccgaataaggaattccgtgtcttgaaggttttggaaaccagtcatgcgattactaagtgttctggggattttgccgtggttgcccgccagactcacggctaaatgttttgccggagatatccccagcttcaccaacacccggagccccgcaaatacatgtacatgtacggagcagtatgtacatacatatcggatttgaggccgaggtcgatgaatttccctttgcgtttagtgctcatccccgctttttgacaactgtgaatttcccgcgagcgacgtcaccacctgagcagcctcgtcctactcccgaggtcattgagcagcacttcctaggctgattactccattggcttgggaactttctcactgcacctcttttttctataaacatagagcgatacttacagcggtctcgtacgctctggtttcaatgttagccttctctggatatggcggggaaggtgggggtggggacgggtttagatggggattgtcgccatcttcaggaacagccgttggacagtgggcacagtatagccgagggtaacttctacatcgatgtttttcggaagtgggcgactttggatggggactttctaggtgcaagagcgatggaaaaagcatggctgaagtgctctaccccagctcattccgaagactgttgggcgagaagttctaccacgaattggatctcagcatctctgttcctctgaagctacgtttgacatcatagatcatatgagaagttgaaaactaatgtgacaacataatatccaatcggttgtagatggctatagcaggtggcgaggcatttataacggcaatagacggatttcgatatccacttcaaacttacttggtcttcaactatttcttcaagaatcgtatcgcatatataaaagatagcgttgatctttcgagataagtcacaaaagtatattctcaaatactcttattcaagttcaaaatgactgtcaccacaaacggaaccaccttttcccacatctctatcaagcctttgcaccggactttcggtgccgaggtcagtggtgtggacttttcggctcccttgacagatgaagtcttcaaggagatacatcaagctataacaaaggtatgccccacattgctagcttccattatgcggtcttcgaattgacagtgtggttacaacgcagtatggtgtcctcgtcttccgcaacaccggtctcacggatgagggccatatcgatttttctaagaaattcggagagttggacgacgtgaagccatatatcagcgctggtcggaaacaccgtctcaaatacgcagagctcttcgatgtcagcaatgttgaggctgatgggaccatccttgaccccacaagcccacgttcccaagcaaacaaggtaaatatctagataatgatcgaaagaaatatctctgcataacagttctgaccatcacgggtacacagggtaatgacctcttccatgtggactcaagcttcaaccctcgccgcgccggatactcccttctcctagcacacgagctgccacctagtggcatgggtggccacactgcctttgcagacacgaggacggcattcgacgatctctcgccggagcttaaggagcagctattggccaagaactacattgcttgccactctatgcaccactctcgcaaaaaggccgcccccgaggcctttgccgggatcaacccgctcgattaccctatgggacggcaccaattggtgcagcgccacgaggcatccggtcgtatgaatttgtaccttgcggcccacattcaccatattgaagaccttactcccgaggaatcacaggcgttgtttgaccagctgttcaagtacgcaactcgcaatgagaataccttggagattgagtgggagcaaccgggcgatctggttctttgggataatacttgcactatgcaccgggctgttggagggcctttcgttcggaaatacaagcgcgacatgagacggacgaccgttcacgattcaagctcgacggcttggggattgaatgagcacactgatgtgaggcaaggacttccttgaactgttgaaaatgtagcgctgggatatccatggcttgtatgaatcattgtgatgttttatatgttgatgaagtcactcttttttgtgttttactctgtattttctgaacattaagtcattttgagacataaattgaataccaattgtttcgcttcgtcctattatgccttgtcataattatagtttttaattaatgcttccattcttgcacaatttgcaaggttcaacagttgcagcatacagaatctacgtgtatggagacgaatcaacctaccgcacgagactgaaatatgatgttctttattctagcaattatagaatgctgctaatactcagcgcgatcctagaaacttagaacgatgcataaaccattcaatgcaaaaccgcctattctatcataacaattggccatgacgattaattgaatttgactacaaagcaccgactcagcgccatataagacagctatacattgcgaagcgaagcgcataacatttaggaggggcccctgctgagccactatacctagaaaagttgctaactacgcccccgtgtatactgattatttcctgacagttgaaacaagggtctgaaaccctcttccatgtctctccacggagagaatcctcgtattgtgcaggccgcaggtctttacactgcaagtaaattccgtgaacgttgcggtttcctatgctccagcttccgagaaaatgaacccaagggtaagtttccgcgcagttcccgatcttttgtgttaatatccttgttgtgctcacgcgccggggttttctggtatgaccatccccgcagcgtgagttgttcgcctgcaacaagtctgtataaaggaggcgatctttggctttctgagtcttggtgggactgtgataaacacgacggagttagtcgagaattgtgttgaaatcatacacgctggaatcgtgtgcgatagcgagcttgggaagtaccatggcctgaacttggcttgcgagttgaggtagacgcaataggtctgggcggtagaatctccgatggctggttcatcgattgtaagctttgcacgatagcggcatttcatgtatcgtattgcttgaggcaaggagagatgaagaaggatggattctctactacaattgagatcgagcttgtttaatagccatgtgaagcctgacaaaccagacatcagcatttgatcggcacgtaacctccacagtatctcactgactgaccggtgaatttctctggatctagaagtgaagactttggacatcttgcttgaggggtaggcaaatgttgaacctgaccctggagagccgttgaaggttttggatctcgcctcgaaggttgtcaatggtagtaacatgccaggtcttgcaaggaagagtgcatcgaattcaaaataactaagatagtaagaaagaagaagcgagctgtataacgggaagcaaccagtcaatatagctgaccactttgcaaacgtttcggcaatgtgagataagattaaagctaagttctaaactataaaatccgacagtgtcaattcgcctcattcagagaagctcaaacctctaccacgaagctaattgcgaggactaagtagaaatatttggaagttatggaccaacctaggtcttaagactataagttacagttttcataacgctgatgcaagtcatctaagataaagagttgcgccatttactccaataccaagtactgatgacttatgagaaaggaagccatgttgtattgtgtgtgtgtgtgtgtgtgtgtttcctaagagagagaaaagaaggaagattgaacaaggtgggggagcagttcctatcaacctaagaaacggtcttaacaagtacacgactttaaatctaacacgacacgaccttgcaacttgccgcccttcatctccgcaaagacatcattgatgttctgcaccgtctcaacacggaaaggagttgagactacccgttttgccatagccagggtttccattgcctctcgacggttgccaacagtgcttccaacaatggccagttgcttaccgaccatcgcgtgaggataagcgccggcaatcggctgtggatcacccggaacacctacgcacaccagtgttccattgaacctgagatatgatagggcttccgcatatgcagcgttgcttgcgctgcaaatgacggccgctgaagcgccaagcccaccagtaatggccattatttcgtcagcaatgctcttgcttccatcatcgaggaacttggtgacatcgatgaaagcttcggcaccacactcctttacaaaagattccttggctcctatatccaaaccgatgattctgaatcccatgcctcggcttccgagctgcactcccaggtgacctagaccaccgccggctccagtaattaccacccaatccccggcctgggctctgctcttcttgagggctgagtaaaccgtaacaccgccgcaaagaagcggtgcagccacctcacttgccaacccctccgggatcggcgtcacatagtgggcaggagccagagcgtattcctggaatgtaccggggcatgtatagcccgagatttcggagttcgcgcagatgccgtcggcgccagccaagcaaggcatgcagttgccacaggcggaggcaacccatttgatgccaacacggtcaccaatcttcactccggaaacctcacatgacggtcctagctgggcgatgatgccgacgccttcgtggccgccaacctgtccgctttttacaggctctggaagccagctccactaatgaacgagattcagtcaggcaaagcatcccacgaaatttctgtgaagaaagattggtcttactgtttttgtcatgaggctgagatccgaatggcatactccggagtgagtactggcttgatgtcagtgatattcaataacgccaatgagtccaacttacatcttgacgaggacttgcccagggcctggggttggagtatccaactccaccaggcgagtggagatctcgcccgggttgtcatagatcaagcctttgtgggttttggggacttccatggtgagaaatgtagacttcggagaggataatagtagctaacgaaggaccttggtggtgtgaattgggaagaattgggaattggttgttctttgttttatagatgagttccgttcgggacccacccccgcaatcctggggaatccgagcttcgtggccatctgtttccatctccagccgtcctcgaatgtccgcgttcacatggccatccgtacctacgtgtcggctatagatggcgcgcatactaacgggcgcaattcgaaattccgctatgagcgaggattgcggggcgatctattgggatctttggaatagataaatacggcaccatcacagcaaaagcgcacatttatcaccccaagccatatcgcacaaccccttacgaccaagtcaaaaagaacccagtcatacacgatggccgactcaaccctaaacttcgaaaccttcttcaacatagtcaatggcgagagccgagtctccgataccacgacattcagcgttgatccttccacggaatccaagctatggagtgtgcccgtggcctccaagaatgacgtggaagatgctgttcgctctgccaatgaagcattcaagtcctggtctacgacaccctttgaggagcgagtgggcaagctcgttcagtggagacagctttacgagccatacattgaggatttcaccaagctactaatggcagagtgtggcaaaccccgtggcgtagcagccggcgaggcgaacgaagttcttgctctgtttgatcacaacgtgcagcttcgcattccggaagagaggctcgaagacgagagccgcatcgcaatcactcgtcatgtccctgttggagtcgtcgctgctatctgcccatggaatttccctctcgtcttgtctattggaaagatcctgccagctttgctgaccggatgtacgatcattgtcaagccgtcgcccttcacgccgtactcggcactcaaatttgttgaactggcgcagcaaatcttgcctcccggcgtcgtccaagccattggtggcgaggactctattggcccagcgctggttcagcaccccaatgtcaacaagatttcattcacgggatccagtgcaactggaaagagaatcatggcttccgcagccgcgacactgaaacgtgtgactcttgaactgtgcgtataattccctcgcacggcactcgaagaatatcctgctcacacacaagattttctaggggaggaaatgatccagcaattgtctaccctgatgtggacatcgaaaaaactgcccctgaagtggccatggggtgcttcgtcttctgcggtcaagtttgcgtcgccaccaagagagtatacgtccacgaaagcatttacgagccattcctgaaggctatggtggatgcggtctctcaaatggaggtgggcaaggctgacagccctagcactgtactgggtccgatgcagaacaaaatgcagtatgacaaagtccaggacctggttgccgataccaaagcccagggctacaaattcgctctcgctccgcgtgcgatagaaggaaaaggctactacatctctccaagcattgtggacaatcctcctccgaccgcacgaatcgttgtggaagagcaatttggttcgttgatcagtcccatgggaaaaaatgaacatactaattctgctgtgtttaggtccaattgtgccagtcctcaaatggtccgatgaaaatgatgttatcgctcgcgccaacggaacgacttcgggccttggcgcatccgtgtggagtggagatgcttcccgagccgagaaagtagccaagcaaatgcaggctggaagtgtctttgtgaattcctgggcgaaaaccacgcctcgggcgatgttgtctgggcacaaagagagtggaatcggcggtgaatggggctctacagggttccttgagtactgtaacacgcaagttgtgcacttattcaagtgagttcaggggttttaactagtgtttcgatgagtaattagctcggcatagccacaatccatagtataggaatagcctctgtcattgaaaagggtatgatctagttggctcaatagtagtctttttagtagtctttttagggttctctttgtgtacatatatcttctccccatcccaagttttgtaggtactagacagaaaaggatggaaaagggtttaatttgtgaaaaccacttttttgtggaataccgaactaggaatatcgcccccttagaccctaggcaggaaccgaggtctttgttacggtctggtaggaatatatattccacatataagcttggacatacgcatgtgacgtatagagtcccgtctattaccgaaccccacagattttgcggatgcggggttaatccggggaataaatccctttttcaaccctttctgcttcctactccttgctatctgtaaatctcatgcacaatgactcgtagccaaaatctccgtgtctatcgcgcgtgtcagcggtgtcgtcagcggaaactcaaatgtgatccgtgagttgtacacctcagtcaacctccgctctcactaacatttttcaggtccaacttgtccgaagggacaaaaccttcttgcgtacagtgcctccgttctagcaatgagtgcatgcccgccgggtcacggcgcggaggcgacttctcacggtttcgacgtccatacggggaccgaagctctacgccaacgcgggctaatataggccacggactgcatgacgaacaaaatagagacgacgaaaaagtaatggatgatcccatctacgctgagttaacaaatccgggtgatgcgctccagatccttgcccaactcgccgcgaacgactcccaggttcccaatcaccctaatgactctacgaccttcgatcctttcccggtgactccatccacgaagcgaggggggacggataccgctttcaatattaatggtccgatcgagtcgattcagcctcctgtgttacagtcgacattgtctgagacagagacattggtgatcggtgtgttaggcacagatactgtttgccgtctaatacatcagtatgaggccctttatattccgtgtgcgatttcccttctgacactttctagctacgcagcaaattaccacactttttgtcccctcgccccgaaacggcttctggcaacaacggatccgcgcaaggcggcagtagatgagccgttcctgctgacagtgcttctgaccatcgcatccaaagacgagcccgcatataaggatatccaccaacattgctggaaatatctcaagcggcacttgttagatatactcctcgccacgccatctaccttaagggtcgggtctgtcgaaggtctcctgcttctctcggagtgggtgccttatatgcaactcgatacctgttcctatcctaatatgttcccgaggaacctgagtgccgtcgaggataatatggcctggtcactcatcggccaggcggtgagacattcttatctcctgcgtctagacaaggcatcctttcgggagacggctcttggggagtcgcaagaactcgagaatcgaaaccttctagcgtggatatgtgcgttctatagattcctgctggttccttatcgatactgactagcttagttgtatatatcgccgaccgacagatctccgtccgtatgggacaatcattctggtctcgtgggccatcgctctcgacgaactttacggccaatgactttccaactctacgtctcagggcagatgcagagcacaaatatgcacatgtgctacaggctactattgagctcacgcagcttcttcacaacgtgcatgacactttatacgcgtccaaggagcgaagaactcaaatggttcgaagaggagactacaatcgctacctagatgattttcggcactccatgtcggcgtggaaagaccgttgggatggtctcgagacatctcccaagctgcactgtacaatgcatatcttcaaggagtacgttcgattgtacgcaaactcattttctttccagtcacttctttccagggcagctcatcacagtcgccctgcgggagaaaaccgggcaacaacttcagggccaaagagagccccctctctgtttccacggggcatcatgtcgaccgcagagggtgcatatgtgctcgaagcagtggatgcagcccgggcgatcctgacaatagttgtccagacaatttctcaggcgcagattcgctatatgccgttccgattctacatgtacgtatcactatcaacaatacggattgtctctgggaatggctaattgatcaataggtatactgtgtactccgcggtgtttttatacaaagcggacgtctttggagccgtcgtgagcacagaacataccgaagtcgtcaacttggtgcaacattttatacaagtacttgaagaagctgccattagcgattcccatattgctagtcggtttgcaagtttgttaaagcgcatgtggctcccggacaggcagtgccattctcccaagcgcaacacatcttccaccgcttcgaactatgtaaatacgtcgtcacagcagtgcgaactcccccgaaatactgatttactcgacgacggggctcgccacgatcttgcttctagcatgcaggttcctgagcctgcacaaattcccacgccatatttcaatcttttttaccctgaattctcgactttagagtcagagctggtcgaattcggggtaggctcaactaacttcccgttttgaagccgaatatatgggtggatgttcataatttcacaggcatggaaagccaaatctgtcaccggatgacagaaataagtaactaacattgtatgggagctacctaagtagggtggtaatatcaaattctaagaaatcatgaaattgtcaactttgtagtcttagagtacgctcttagcctttgaaaccatcaaccagggtagttactagctagcacaatcaaggcagttcgattgccaccagaccgatggtggaagagggtactatccataggggggatcagacctttgtggcaaaacattatgatggcatatccatacatctagaattacctcagaacaaccatggcccacaagtatgaattgactggctcacactgagtcgacctcgggatatatcgaatcagtggcacaattagatacatctgaatggcaagtgcggagaaggacccaaggtgatggtaaatatcatcgtcatgatcaaatcattgccaccaccttcgatacacataaatacgaacggttctccctaaattctagaggatataccaaacaaaccgaaataaatcgacataataattatcaatttcttggtatgcttccactttgacccttttccttgagatgagcatcgggagttgatagtggaggaggatgcgatgctctataagaattcttactaacattatcaagacatcatgcctaaggataaaggtcagaacaagggcgagttagcttccgactccagagctaagacccacgctacggaaaaggcttcccacagcgagatggggcctaacgaacttttgagtgaacacatggactctgctggtaacccagtacctgatccaagctggggcacaaccaggccacctgaggaggatgaggatttgtttgaggctgcgaatgcagacacttcggaatttaaggattaatttgggatggaaagggggtttttgatgggcgaaagttaaataattatacaaattattcttgaatttgcaagctatctactgcaggtttcaataactacatgtgtgtctccatgtatgtttcaataggttccagtacaacataagagactaagtacatatagtggagttcgcgggctcattgctatggcaacacaagttatagacggtgacacttcgtagcgtagaaccttggaaatatcatcttgttgctcttatttgtctgttgtcgaattcaattgcaattgcaatttcaattccaatttcagcttccgttctttctttttatattacattctttccaccgaatatgactctgagctcaagtgtgtttactatgaactgaatctcccaaggaaacaacgacagtaccgaccccctccctttcactcattcctgtccacatattccctctccaatctcttattttcccctctcaaatcctcatgtaatcaatcttgcatgtaccactctcttcttgatcgacgacgcgacgccgtcaccgcttgtgtgcagctattaagcgacaacaataggaacatggcgcttgacccgcgcttctatcaacacatcggccattcgggcccaggctcgatatcttcagccgcttcatccgtcatatcggccgccacagggatcacctcacctagcattatctcgacctccgcttccgccgccaccctccgatctacagcttcaagtccttccttccgcgcgcgagacgggttcccgatatccaataccagagatgggatggccagcccggcaccagggggaaatgtgcgtgtcgtcgtgcgagtgcggaagttcttacctcgaggtaggtcttgtttgggagagctgcggggtggcgcggtaccccgaaaatagagggtgtgttctgacctcatcttgcagaaatcgatcgcaaggcagaatgtttgatttcgatggacccgcgtacgcagatgacctgcctgcaagcaccgaaaccgaaacccggcgaccaagggaaactcaagtcccacgcccgtggcaagatcttggaggataaatcttttacattcgacaactctttttggtcccatgacgaggaagatgagcattacgcacaccaggaagatgtgtataatgctctcggtgaagagttcctggatcacaactttgaaggataccacacgtgtatcttcgcatacggacagacaggttcaggaaagagttacaccatgatgggaacaccagataggcccggcttgattcctcgaacgtgtgaggatctgttccagcgcattgagaactccccttctcctgatatcagctacaacgtccgagtatcttatttcgaagtgtacaacgagcatgttcgtgatcttttggttccacgaacagatccaccgcattatctccgcattcgcgaatccccatcggagggtccatatgtcaaggatttaaccgaggtcactgcacggaattatactgaattgatgaagtttatgcgaaagggcgatgtctcacgaaccacggctagcacaaagatgaacgacacatcgtctcgatctcacgcagtctttaccatcactctcaaacagatccaccatgatttgtcaacagatgagacgactgagcgcactgctcggattcggttggtcgatttagcaggttccgagcgtgccaaatctaccgaagcaactggcgctagacttcgtgaaggtgcaaatatcaacaagtctttgactacgttagggcgtgtcattgcagcgcttgccgatcccaagaaactccgtggcccacgaaagggcaaagaactcgtaccataccgtgattccatcctgacatggctactgaaggacagtctaggcggcaactccaagactgcgatgattgcctgtatcgcacctgccgactatgaagagacactttcgactcttcgttatgcggaccaggccaagaatattcggacacgggcacgggtcaaccaagatcaaatgtcggcagctgagcgtgatcaacagattgcggagatgacagagacaattcgcgccctacaactcagcgtgagccaagcagcagtcaaccagcgcgcaagcgaggcctccgatgaaaggctcgaagagtaccagcagaaagtcgagaaaatgcaacgcctcatggaggagaataagatggtcagtgaatgcaagattcgacaactgcaaacagaaaacgacgctttgcgcatgcatttgaagctagcggttgagagtctcaaaaacccaatcccggccattaccctcgagcagcgaaaacctagcattgggtccctgcaagatgagaatcaaccgcccagtcatgacccagaagaccgtgaaggctctcctttagtatcagatgccgaatctgaaatagacgtttgggaagatgatgatacggtcaccgatgatatcaccgacgaagaggcccaacagatgcaagattacatgcatgagcttcttggtgacctgagtgtcttcaagagaaagctggccacggaccatgcccgcttccgtccaatcgaggagcatacgactcagaaacgccgcgccttaggaacccttgtcagtaatcgttaacatgtgaatacaagtttatttttatcttttgggtgtacagggattgcatggtgttggtggcgagctctttgtttgcacttccttgtttgaattaggcccagactacttttggcccgtgtacttagttctttgatagcgaaccctgcgatgaataatgagacatttgacgttatgtatgtttcaatgctagctacctcattgattgggtatcaccattctttcaggccgcattcttatatgaggctatgtccttcaatcagcagttgtaaattatttctgttcagtatctaaccgaagccaaacgagaaactgagaaaattcaacgaatatagttacgctgtttattgtatgcaatgaaccgcaagttagggctgcgccgctcagtgagccgcttatggcatcatttcattttgcgtgagtcaaccctccctcctccccaccatcttcgcagaaccacactcacacgtgaattaattcacagacaagatgacggaaccctccaattcagtgccgaccgcgcaagtcttaactcctgcctcgtcagcactagagcaatctcaacccgtgaccgaaaactctccgcagactctcccgatccgcgactcaaaacccactaaacccaccggagatgcgcccgcgtccacagacggcaccacagataagccgcttagcccagccgagttgaagaagaaagccaaggctgataaggctgcccgacgtatccgagagaaactcgataaggaaggaggcaccatcggtagtgccattcccactcctggtgtcggcgcccaggcgcgttcaccaactacgccgaagaaggatgccgctggtgctggctctgcacagaagggaccccgacctcttaccccgcgccgtggctcaggtcccctcgcgcaaactgggtccgttctcgtggagcaaaagaagaagaaggatgataagaaggttgctgtcttcggccatttgtatggacaacagcgccgtgtcactgtcgccggtgccacaaaggaagtgcaccatgccatcttggccttgggtatgcagttgatggactacactatctgcggcagcagtgcgcgctgtgtggcaacgttgattgcttttaaacgagtatgttgttgttcttctgtttcatgctggtaagacatgaccctatactgacaagtcactttctcaaggtcattgaatcttacacaacccccatgggcacctctctggctcgccacctcaccacgcacctctcgtatcaaattacctacctctcgacatgccgacccctctctatcagccagggaaatgctatccgtgccctgaagctcttcattgcaggcattgatccctctacccccgagacgagtgcgaagatctcactctgcgaatacatcgacagctttatccgggagaagattaccgtcgccgaccaggtgattgcagacagcgcagcacagaaggttcaagacggcgacgtgatcgtaacatttgccggcagcagcattgtcaagcagacacttttgttagcgcacaaccaaggcaagcggttccgtgtctcgatcattgactcaaggcctctctttgaaggcaaaagcctcgcccgcgatctcgccaagagcgggctcgacgtccaatattccctcgtccacgccatcacccacgccgtcaaggatgccacaaaggtcttcctcggcgctcacggcatgaccagtaacggcggcttgtactcccgcgtcggcaccgctcttgttgccatgtccgccaaagagcgcgccagtggcgtcgaaatccccgtcattgtctgctgtgagacgatcaaattcaccgaccgcgtcgccctcgacagcatcgtcgtcaatgaaatcgccgacgccaacgagctgctacccttgaacactcctgtctccctcgtcgttcgcgacccggcagatgcgtatgtcccccctccgcctgagaataagaagggtggaaaccgcaccccggttcccgaacctcctgttaccccgcacaagacctcttcgtcgcctctcgcgaactggcgcaacactcccaacctgcagctgctgaacatcatgtatgatgttacgcctgcggaatacgtcgacatggttattactgagatgggcagtcttcctcccagtgctgtcccgattgtccaccggatggtgacaaacctgtgatgtattgattcttcgcttttttttgcaacatggtcatgaatctggagcgtatcgaacctgtaatctaaattaaaagcaatgaaagtggttccgactgcttaggcgtcatgatttctaggtctgttttgtctttctctcttttatccttgttttccgtttggaatcctcgtgggtcagcatttgggctggttggtctgattgtatgtgtatgtttttcccatttcttacatttatttactcgttggaattttattttagaacaggatgaacagacaataaatctctttatgtacattcggctttggaatacggaatacttggttcccaatgtctataggattgcagggctatttgtacacgccatcaggacatgccgtgggaagtgtttagatgattaccccggaaatggacgcttctctatacaaactcaaaaaagcgccacaaccatagatttgcgaaaaataaaccgcagcttgcaacaatttacatacacatacgaattaaaaagacaaaaaagaaatcgacagctcagagattcgaactctggtccccgaagggactcgcttagcaggcgagcgccttaaccactcggccaaactgccaatagatgatagtttgccactcaataaaatcaatatttcataaggtcaacatttgcgctacaaagactataagttagatggtttacaggttagtggatgtcatggtagactatgaaattgtgctaataattttagggttcggagctcaggggtttatcacctatacggccgtacaatgagacttcaaccgtaacatagatatgtgagataggaaaagaaccatttatagtagtcgagtgcaacttttcaacatcaattaatctcatcacgatctctgaatggccacccctttctcagtagattaatgtcttctgtgtcaccctccgcagtagctattagagaactctcaagctcggcagacttccgaacagcctcttcgaaatgctcattgctgacccagccatcttcacttgttacttctatctgctcccgccaatgatccacaagtttgttgatattaaaccatagttgctcctgttcatagaagccatccagctccgcatcggtgaatcgcacaggataaggtattcctatatcagacaggtggggccagtaatcagccatgaggactaatgcccctttcagtgtcatcaagtttccactccattgtttgccggccctatcaacaagatgctggcgaggaaaaaggatgggatcacgaagagcttcgaggtgcgccttgttcaggtgaccgttaaagatacgatagtagtaagagatgagacggcgtcgctggagttcatcagcttcgaattttttgtcagccggaagcgtttcgtattccggtggaagtgatggttcttcaaaatgaggagtttgttctgcatctgggctctcgaatgtatgggggtagcctgcgaccagcacatgcagctcgactgtcgtatgttgtcagtcaatgatacacgaggtggcgccagaatcgggggaaacaaagatgttatttgggttcaaatctaaagatcgtcaggttttgtcagtgatgactgtcaatgagacgtacctgggtggcggagagtgggccgattaagtgaactgtcagcaacctttggaagtaggtatgatgccaatgcaatgtacttctccagaagacggaggtaatcctcgaggtcttttttcccagggaagacatcattgtgcgggaaatcaagttctaacggcttcccgtaccgctgagtccattcaatttccttctgtgcgacagataaaagataatctttgggatcgttccctgtgatgatcaaaatctgaacttcaaagtaatgaaagttacactcacatggaccacagcggagattcagaccggcccttctttcataccaaaacatataatccgcagttggaccaatgcaaaatatctccgagtcttcacatttttcagtgctcgctatatagcacagcttgaagttcagcgggaacatctttcttgaaataaatgctcccaatagaccggaagatcccattataatcgacttggttgtcattcaataggaagttgggggagttcaacaacacaattcagacattagatgacagagcgggctagaagttttaatgtagaattaaaccactcatcgtccaagagctattgagccgaatgtctatccctaggatcaaacttcgtgatcttacgaatgaagtttttgtcctcagttgagacctcgtttgttgaaatatgtcaaagggcatctgcttcccatgaagacggctcataacctgcataagcatatataacgtggaagggggtgcgatttcctgataagagataggaaatggtccaaagaactgacattgccttgtaggaatcttatgatcatattcatcatgatcagctgagacatcgggcttgaacatgaagtagttatcgccatatatcaatgtgatgagctaataatatacgttagcagggagacaatatacgggtggttgttacacgcattgcacacataccattgtaccaaacgaccatatatcagttggaataccccagccaattcgaagatgagcctcaggactccgccatatgggtgcccctatgagattttcatcgtacgcatacttggaagtcgcagggatagtacttccaaagtctgcaagttgcacatcagtgaagcttacgccctcaacttctgtgccgtagttcacgagaatattgtcctgtttgacatctgccacgatatagtcagattagagtctgcgcaaaagttgcggtgatcatatattgaccggtatgcacaaatccgccttgatgtagcacatctaatgcttgtaggactcgtctagcaacttatttgatttccactttgttttaagcacatatcgctcgttttctaggcgaaagtggcgaacactaatgaccactatttggccgatttgagacctttcacaattagccttttttcgtagactcgccgggctgatatccgcgcaccttgccaaccagacacagtcctgggcatgctttatagtattatacgaggtcactttgcccttcaaactctgaccaagatggaataatgcagacattttccttcgactgtcgattagttattcaggagaagaatggagcaagaaatatcgcagcaactctgggaaacaaggggcgttgaagtctcaccggctttcttatgtcttatgttggccaccgtcggggtcaagatcatctagggttaaagttaagtaagttaacatttgtcttcacaagacgagagtcacgagacaagccgagggtcttaggtagatgtcgacatgattaaaatgaggcttattgtgacgagaggctctttgtcgacgcaacgacgatcctttggtaacaagctgccggcgcagaacgtgtacagggcctggtacaatataaacaactcttctccaagcactcggacaagccgaacagttggtgaagcaccatttgggggtagtatgagcccaatgacacagtgcatctgtcatttgcagaagcgtagtcaagctactagacctcaaaatcataataagtatggtgggtggttaaaaggaatatactagtacacggaccacccacctgagctggagaaataaaagtggacctgtggcggagacccactctcggattatatataatactatatgcgaggtttatccggtggtgatgagtcttgagcacgccgcgaacccaggggaacttgtacaaagtaagtcaagagataggaccaccagtttggaaaataagtcataaactacttattgtaggtatcaaggcagatgatatcattttcgtagagcgaaaaaaaaaaaaaagccgattgatgataactgttacacctgctcattttattagggagatacgaaatcaggcatttacggtcatgtacatgtgtccaactaaccagccttggaatgtccaattaattatgtgtacagtcaatatttgatcgttctgttatatccaatcataaatgaggtttatggtcaagggcaggtcaaaggagtcagtcctatggatgtatgcactgttgtcgagatcaagagagtaaacaaaggccgtgttgtaactatatggcacttgggagcagttttgagggtgaatttcgctggctgtagatctgagatattagcctgccggtattgctggctccaaatttgctgtgtgtgattcagtaattccctggcagatatgtatatatattttatttcgagacccacatactgcacctcgtgggagtaatcgactctagaaagatatatggcaccctttcaaccacctgccaccagagaagtcggcgccgtatgcggcttttcctcgatgaaacgttctagtaatctgatccaccaccaagatgacccaagggatgttatgcttagattcttcgacaacgcctttctgtatgtatttgttggatgttaccgcgacccacctatcagtatcccagttaaaagaatgaagacaatttatctgtaggtataaaaacaaaaggaataaagattaggtggcgtaggaccaaagagatctcgacaaggcaaacgaagtccaggtacctctatccctaccgacactccggttgggagcgtattatcaagcctgtgatgatcaggtttgatgagagctgatattaattgtttagaaaatagataactacaactttgcatagtattacgacacccccattcgtcgcatcatctggaaactacctatactttcgtggaaagccctaaaatgagtatttaaatctatcgactcgaaaatgcgagaaataaccaaacacttgcttccaactgcttccaatgaagtagttaaactaactaatacttgctttattaactagttatcggtcataatgatttatctcggataaatgcaatatctatcttgttgggtggcaaattatcaccaaataggcagtttggccgagtggttaaggcgctcgcctgctaagcgagtcccttcggggaccagagttcgaatctctgagctgtcgatttctttttctttttttttttttccccctttctttgtgacacagaagacattaatctactgagaaaggggtggccattcagagatcgtgatgagattaattgatgttgaaaagttgcactcgactactataaatggttcttttcctatctcacatatctatgttacggttgaagtctcattgtacggccgtataggtgataaacccctgagctccgaaccctaaaattattagcacaatttcatagtctaccatgacatccactaacctgtaaaccatctaacttatagtctttgtagcgcaaatgttgaccttatgaaatattgattttattgagtggcaaactatcatctattggcagtttggccgagtggttaaggcgctcgcctgctaagcgagtcccttcggggaccagagttcgaatctctgagctgtcgatttctttttctttttttttttttccccctgtcttatacctatacttgaggagttattcccccttctcactttttatacatggagccatttccttcttgcgatacgtggatatgttttctaaagccatataactagtgattaccttggatgttgtcatcgaaattgcacacgtgatatgagcggtgtacccaagtgctattttgccgtcaacaaccgtcaacatgccgataaggcattgtgagcctcaacaagttcattggcaagatattctcacatctcttaagatccctgttagcggatcaaggatccctcaaaatggtaaatactgaaccctactctcgcctagaatcccctagatagtccaccaattcccaagctaacaccaaaccaccagagcaaagactcctccgcctcatacctgcacatgcatcagccgcggctagcagacctcttcgaagaatttacacgcccacacacctcaacagctaccaactcaacaacagacccacacaacgccaacagcgcctccgctgcaaatcgcgaagcagcaagcacaaatgccataccatacgggtcgacctctccctccacaatcccctcattcctgccaatagaagacatctacgtggcaccgcaataccagcccccgaaccctgaagacgaggatgatgtcgtcccagaccagcatgcggcgttcggcatcactcgcgccatggaacggagacgagaggccgtgtggcgcgatcttggtctcgaggcgcttgttaacggcgaagggtatggacctgatgctgggcctttgactggtgctggaggtgctggggctgcaacctctgggcctggggctacgctgcggggtagtgggggtggtgcggcggccgctggggcgcctgttatcagggtcagggattctgggcggaggatgggtggacgtagggttattgggttgcggtaataggcatcagtgtttactgagccttttgaagagttgtcttttattgggattgttgctgcgaaagccaggcgggtaaatggctgtcttgtgttgcattttttactggagcagattctttcgggctggatagccttgttatgatacccacgttggatgtatccttctgttgttatgatatatcttgaagatcattgattcgtttccgtttgcgatttcgttccaagaaccgccaatatcaaatggctgcagatctaacttggtctgagccttaaacgccgcgcgtaatgcgatatgattatacattcccctagatacgaatgatgtcgacccgagcccgctcgtacagtttgtggctcagttgtttctgttcgcgctcgtcctctgccaacagtcggggatggacggccatttgggcgtatgagcccgcggcgcgacgctttgatagggtgccagggttgatgactagcacactgtcgacgacctgcagaaattataaggttagcaccatcatggaaggtggaagtaaaaattttcggctggggataacatactttcacgaaaggcggcagcatgctaggcacaattagaatatcaggccggacattccaccactcgcctagtttcatgtagggaatatccagcatagcacctgtagccatgccaccttcgaagccgggctttggaagatttgaccgtgcagtcggagggaacaaggggaagaaatggcgttgctcgatgagatacttgggcagacgggtgagcaggttaccctctgcgggtcgaccatgcaagacctcttcgcggcgaagttcggaaagcacatcgtgtgagcacattccaataacgcattcgttgaatgacaatgtggcgggattcgagacaatgcggacctgcttagggagaccaaggtccttcctggggagctgctcctggggccaggagacgtgtcggctgagtacatcgcggacagacggaaccagcacgatcgtgatgcttgggacagctgctgcaagtcgtgctagtgacgttgagatacagtgccggaacattagggacattgtagctgtgtccggatcgaggcccttgatgtctggcaggtcaaaatcgcccgatgcaagaagagggtgctcgatgtccaggaacggtcccatcagcaccagactgtcggcgtagttttcggctgccttctgacatagttcctgcagtggctcgaagtccagattgtcgtccgctgtgtagggaccggccgcaaccatgatattaagcggtgggtttgcatctccgtcaagtcgctcgttgatgccgtctagtaccatagctgaagatacggccggtggcatcaggggaattgggagcacttccttgacagtgaaatattcaccagaagggttgattcctcggagagccacgatttggcctgggaaaaagttcaccgagggtacggaatccaccttcaatgggactcgtctgccggctccggtccgacgcgaagtctcaagtacgagggatgccgggttcagttttccctcgagactgtcggaagcgatccgcccgacagcaataatctcgcttgtactctggatagctgcacttccaaatgtaatatcgtctgaattgaattctgcctggaatatagtcgcgaactcgtctatacgatcatccagaatttccgatgcttctgacaatttcatgcccatgggcttgtagccaagctttttgaggtccgtattcgctgttggcttgatgcgcgcctcggaaaatggcgccattggggttgctggctgggataagtgcgcattgagggtttctatcgtttgaccaggattcggtcgatcggagaacgaaactgctctgttcctgatgtcagcaccttcaattgaacatacacgccccgaaagtacatactgcatgccatcgccaggtgttccagttggtgtttttgtgccggcttgtgatccaaacttttcgaacttgctgacttttggtgtagcgggggaggtgaattcggccttgcgcttcgctgatccaaatccattcccagttcgagcattcgagccagttggtgtcaattgatcgaacatcccaaacatatcgccaccagctgcagccgcgccccgcggagttgctgtgtttgcagttcgtttttctgtgtgccggccggccttgtcacgactttcgcgttccaaagcttcttgaacatcttgcttgaagcctcgcactgtttgcatagtcaaggttaccccttcgcccatctttatgctgtatgattcccatttgtagaacagctcctccgcggtgatcgaatgcacccgcagtatggagaagagctcggcaaggatgtcttttgggattccatcggggaatgagcccacaaaaaactcattgagctctccctcggcatccattatggcgaggtgtgtatcgtggaagggcaatggacattgaaagtgcagacacgcgcaagacgcgtgagaccgtgtcgctgacctaagcggcccaaagcagtaatattattcgagtttgatcggagtggacctgtcgatcgcgagaattgtgattagcttgcccctaaatttattattcattctctagattcccacgtgtcattgtaaattctatatatttagatccatcaagatcatgtcgaactccgaacaaggcgctactgtgcacccgcccaccaatggcgatactgtgtccgataccaacatgcaggcatcggccgaatcagcccccgtgaacgcccaggacgagtctacttcaacctcgcagccaattgacctcgagctaccgacatccgctgccgacggtctcattcagaagcctttcggcaagccgctggacacagccaagccagtcgcacctgcgccgcttaccccggaacaacaagccaagtacgacactctgttgaagctcgtttcatcatggaccacagtcgcagacaaggccgagaagaatgccccgacatctcctataaccgaggatgagcagatgttcttgacccgcgaatgtctcctgcgctacctacgcgcgaccaagtggaacgtgtccgaggctgagacacgacttcagagcactctcacctggcgccgcgagtataacctgaagaaattgacgcctgattatatttcaatcgagaatgaaacaggcaagcaggtcattttgggctatgatatcaatggacggccatgtctgtatctcttgccctccaaccagaacacggagaagagtgaccgccagctcgagcatcttgtcttcatgctagagcgggccattgatctcatgggacctggtcaggaaactcttgctctgattgtcaacttcaaagagacgaagtctggccagaacgcaagcatcagccaggccaagcagacggtcggcttcttgcagaaccactaccctgagagacttggtcgggctctggtgatcaatggttagtgatgtcatatcccagtcaatcttatgacaagtgactaacctcctatattagtgccctttgtcatctggggattcttcaaattgatcacacccttgattgacccgaatactcgacaaaagctcaagttcaacgaggacctgcgtcaacacgtcccgcctagccaacttatgaagtccgtgggtggtgatgtcgaattccgctacgaccatgcatcctactggcctactttgaacaagctggctgaacagcgccgtgaggcgtaccgtgaacgctgggttcagggtggcaagcaggtcggcgagtttgagaactacctgaagggcgaggacgttcccaacctgtcccagaccaaacttgaggccaaggccagcgaacaagcttgatgggaagagcatattattttgcgcctattttggtgcatttgcatttttggtcaccgtttatttcatcttttctattggtcaatagccggcatttggtcacagcgttggattgattactgttggattgttttacatataccgctctgtttcgacacgcctgttcatagacatgtcaatctttgtcaataattaagcgataactagagtacccaaattatagatacctaatttcttcagtttcctgtttcctatcatacatacacatcaataaaagaagacaaaacgatagatattgatacttgattatatataggccggagttagtttggatgcaaaagtcaatcttgttgtagcacaacgatcacagtaagcaagaatagctggatgcagtcgctattatttctctagatttagatagcttctaatcttaacaccgtcttcattaaatcataagcctcatgtgcgtatcatagccgctctcttctatcagatactatactctagattaacaaagcttctccaacggattggcgctattatcattacagcatgactggccgaagaagaaatgttgcctgtagactgttgtccaacgcctttctcgggggtcattggttgaaaatggtactgttgggattacatcgtccttggtagatacttattctagcccgacgatatgtcggataggttaacccgatggtgacgtaaatgagcacataaacttctgcttgacctcttgggcaaaagcatcctcggctgctttctttttattgcgtaaaacccatgggacaaatgtaaagtggagctacaggtgagcccatgggcccacctgtgttctggatatcgcctactgtaagcaaaccatcctcaaccaatgaacatcctttggccttcgggccccagtctgattctcttccgaacaccacgcgaggatatccatgaacagtaaaaagtctaaatgtatctaatcaatcagataaaaattcaaattcctccgatgatcgagtttccatccttccatggaaagtttggtggcgctaattgttgaattaccagaataaagatatcagcagggtgcttcgggcgaagtatggcattttctcgctggagaccttgtagaccgttccgttttaatgcctactctctgtcgctttttgctcactgagtaaaacctagcatgcccttgaataccacgtgactttacagtcagcagctcagctcaatgtaaaatgcaccacgctagccccatccaatgaagtctttgaccaacacacaagcttttgtgatagggcgatgtagtcccagagataaatagagtctcgggacaaaattcttggtacaatctttgcagcgcaacatttaacaacatcgcgcatcatcgcatcataatgggggatcaagcaaacaagcgtatcatggatcaaatcccagacacaatcctcaaactcctccaagaagttgatccaagaccagttcgaatactgggtggcacccccaacagcttactcgaccctggagattatttgggatttaatacgtccatttgtgtcaaaggctcagtgttctattcacaagtgtcgtccagaagtccagactcgttttctcgctgtgaacgtataccctggaaaccctacctgatttgactttctaattataatcaggaatggaagctgcaatgctgggggcggctcagcccaagtatacaaccttaaagacgaccatgagcgagcaagaactaatatctaccaaactatagccaattccttaaagtgacacaggatcttaacgacatacccagggttcatattccttacacttttagatacagtgctgtatcaggacttcgtaattaacagtgggagcccatgacctacaataagcggtatggagtaatggaggcgatatggcaagccacagaataaatggccatagtcagaatacacgtgactaactagagcatgctcagtctgagcccgtgctgacatctacttgctgatcctgagcctgagcgccctcataaacggcggcagcctagatgggaaaggcctcaccgggcagacattatcctgtctatacgacgtatagctacatataaactggtggctaacgtcggtaagactaaagagttcggaataaaatagtctgatgcttgcatattccttatacaaagtgtcggattttacattactccgtactccgtagaggttccaacgttgacaaagtttttcactttccgaatcggttgagcgggtacactatgtcctctgtacagccaccgtattatgataagattgctatcaatcagttggatactcggtcagaattctccgggtattccccgtttccccgtagccctgtaggcccatgctttggacccctcattaatgtaattatcccgactaggttgctcaagtgagaattccggttttcggagcgcgtttagcgagacttatctgcttctaagccttgcattagaggaattatcccgactacctgagcccatgggttgaatgaatttaggaccgggcagtgcttagttaggtggggaagtacgggctacgtccacgagataccaagacctcgggagaccctgcatgaaagcttagcgccacttggtaaaattactagttcacatgtcaaaatcgatttccaatctacaaagtacaaaatgaaaccttgggagctcgcttcctcggcccaatgatcctgctctcgcccagtggaccactcgccgtaagaccccatccgatattcgaaccgcccgatctctctcgattgattaaatctgaagagccaagacaccagtgcctacacgcttctccgaagcgggacctcttgtctcaacgggtgctaccggatcttcatagggacggcgcagaatgaaggctctcgtcttggccttggcccttgcgacgctgttcatagccgggtcaatgatcgggatagctccacgcttctcacggtagaacatcagcgcatagccaatcatgacacagatccagtataagttgtaggagatcacggagccgtaatcggccgaattggtccaaccaagaagcgcgttgaagataccccaaccgccgccacctcccagctctgggttacaacagttcacgtgccagacactctgtcggatgtcgtaggatccggcaccagagccagtctccgacgcgtcgcctccgatgatgttgttccaggcgttgttctccaagtaccacacaccacgcgagaaaagaccggcggcaacgaggtagaggaagcaagtggaaatgatcaagaagatctgcatcgaagtctgccgtccacctctatcggtatgttagcgctgtatatttatcaaagacgatcgaatcgacataccggtagataacaaatcccaccgcgataccagccaaaaggccgcaaaagacggccaaggggaaggaggtggcagggagccctaatccaacaccaccaacatagacaacggcttcgagaccctcacggagaaccgtgataaatggcaggatgaacatgacgtatttctccaaccatctcttgacgcgacccttctttgtctcgttaggatcgtgctcgtgttggagggccttggcgagcttgacacgccatttgtcttgaagtttagacacgcgcagaagggcagcgcccatcacagtgatgatgatcgatgcgatgattcccagaacaccctcccaaatatcctcggtgctggagaatgtgtccgttccgaggccgtaaaaagcaccaatcatacctgctccgactgcgagacaaataaatagacctaaggcgcatcccagccagacctatttgttttagcagatgaaattgcataggagtgtaagagccggtcgcttacttgtttcactagtcttttatacgtcgggcgatcactctcgtagagcgattgtttcaagaatgccagtagaactgacacgaccaccgtcgtctcgagacattctcggaagcagataaaaaacactgattgaatatttagtaagtagttgtgtattccaaaaagcagatgaactataccggtgacagcgaagaccttgttattgcccatgatgcttgatatgactttgccagttccccaaagttcaagggagaagagactcaaataatataaagccaccggaaagcaaagcacccgataaggtctcttgtagccgtctgaaaaatatatatcgaaattcaaaattcaaaattacgcgggagacaacaagcgtttcgatgtctaacgacccacctgtattgatccgattgagcttagcattcttggagggttccccgtatcagaagcttttttgggcatctggcattatgattcgtggcagtggatatgtcttgaacacgaacgctcacctggccagggtccagccaccttagttgagttgaatcggaaaaataaccggcctgaagggatagaggtcatgccatattccttaatttggcaggtgagcagaagttcataaaaatgtgattcgttcaccattgaatattaagcgaacaccttgccttatggctgtgtccaccgttggtatacctggaaccaaaccaataagaagggggaaacctcccatggatttatatctgattaggatcagaaggatcggaaaggattgagtttccccttatcaatcttgtattgcgctcggactattccaaacttccgttcccaagcgttcccaggctttcctaagctcatagtccttctattcctctcttcacccggaaactggaaattcttttcctgcttcttccccggcgaagtattcaagcatgactgtatatacaatgctgttccgccttgcggcagtactacttcttgtacagtactgtcaagcgaagacagtgaatctggatttcaatgtcacctgggtcaatgcaaaccctgacggtctctatgagcgcaaggtggtgggcattaatggccagtggccgctacctgtgattgaagtggacaagggagatcgcctgattgtcaatatgtacaacgggcttgaggacaaggagacttccatccattggcacggcatgttccaaaatgacaccaataatatggatggtccagcgatggttacccaatgcccagttgctcctggcgcctcgattacctacgacttcaccatcaaccaaaatggcacttactggtatcattgtcataccgatgcttgctacccggacggctatcgacaggctttgatcgtgcacgatgatgaggcatatttcaacgatatgtatgatcatgaggttaccgttacgatgagtgattggtaccacgagcttgttgaggacattccgttcattcgtgtccaaaacccgacgggagctgagcctgttccggatgccttcctcttcaacgacactttgaacaccaacattcccgtcgaggctggaaagacctatttgatgcgattgatcaatattggtgcctttgtggcgcagtacttctacatcgaagatcacactttccgcattgttgagattgatggagtatacgttgatgcgcaagaggccgatactctttacatcgctgttgcgcaacgttattctatcttggttactatgaaaaattccacggacaaaaactatccgatcgtgacagttgccgactcaattctgctggatacaatctcgccttctcttcagctcaatcaaaccaattggctcgagtacaatagcaatgcagcgcatccgcaagctgtaatgaaggtggatattgcctccgaccttgtcccatacgatgacgtgaagcttgttcctcacgaccggatggagctcctcccagaacccgatatgattattgaggttgccgtcattatggataatctgaataacggtgcgggctatgcgttcttcaacaatatctcctacacgaggcctaaggttccaacattatactcggtcctcacatctggagattacgccacgaacccgcaggtttatggagaattcacacatccgttcattctcccccacaatgcggtcatcgaggtggtcctcaataaccaggacggcggttcgcatcccttccacttgcacgggcacaacttccagctcgtcagtcgcactccctcatatggcccttctttcaatgactacgccgacggtgacccacttccttacaatgcaaccgataccccctctagcaccttccccaaataccctgctcgccgagataccttcgtcgcaccaccccagggcaattttgtcatccgtttcgtcgctgataaccctggtgtttggttgttccactgccacatcgactggcatatgtcgcagggcttggcgatgtcattcatcgaagccccgaagcagattcaagagcgaatgtcgctgacagagagcgaaattaacctctgcaaggctgccaacctctcctacgagggcaatgctgccgctaacacggaagatctgctcgacctgaccggtcaaaacaagcagcttccgtggctgcctgctggatttacggcgaggggaattgtcgcaatggttttctcctgtgtgtccgctttcctgggcatggcgttcatttccttctacggtatctcaggcattcaaaaggagactgctgtggttaccgaacatgaggaatcgtgaggtattttattggatttctgctgtactttaatatatatatttgtctttcttaagtggataaaaattttcattcaccttgaattgttcggttatcaaatattccttgcatgtggaatatagcaatacacgtctgaatggtactttccaagtgaaatttaaaggacaacttgggcttccccgcaatatcaaccctcggtcatcggctttactttccattcctgggaagcgacgctgagaagtacggcatcgcattctcaggtatgttgacatttggcagaaatgacaaaagcctatgtaattgggcttcagcagtgaaaccttaacagtataccgatgcccaagtcccttcccagttttgggctggtaatatgcctcctcgtgatcttaccctcagtggtgatcacactagcatactgcccccgctgcggagcatcagtaaggcctatgcgcctgtgtatccattttggtatgaaatcaatgaacgatagtggaccgacaaattaggttctcctagcgatgtcgctgtcgtcatccacgctggtatccgcaccatttctgatccatctgaatatgaaaatgatggttactgcaggtttggaattatcgaggctcgcgagattgatgcgatcaatatgctcgatactactggttagctcaatgtggtgattatgtgctctccaactcatccgcttcgaccaggaacggatggcatcaccaaagacatccgtgatcgcgtcggaactgacaatctgatctgtctttcgattgacatcgacacccgaatctgcttgtaagtgtcttttctggagaaggcaccattatttattgaggagttccatgaacttcaacggggcggaggtaaggcaaatttgctcgtatttacgcccatagccgtgtcaaagaattgaagaatggaggagggtttgaaacccccatgtcaggttgtaaacaatgatattcggtgcttatggacaggcgttagggttcgggttcgggttctagcatatgcagcgcaaggattttatttagcctagaaatcgaaaaaaagctagttatcgcggatccttcaacggtttgatgatagtggaccttttttccaagccaatccaggaacgaaagtcaaaaaagacacatgtttcagcgcagtttccacgctaatgggtataagaggaagactagatatcttgggctcgagatggatagccaattacagtactccagctggaaagttcaagcctttagacataccacggagtactctccaggagtactaattatgttgtaaagaccgtttgacatagcagtggacatcaagcgattccccaactctgagcctggctccgcatcgcggtgaattagggtggaccccgggtctaagagaactaccggattggtttggctggcccgtcttggacaccattgggctccatctggaagtgaacacgcagcgatcggcatccagaagggccattgggtgagtgggagggtcgaaaggaaaaatgagctcggatagttcctttcagcccctcaagtgcaccctgatagagctaaaaagcaaacctgaaacgaacaggcacaacgtggagacttgaaacatccggcagttttaatttatggagataagcgtcggccataatagttcacattggaagatatgtcaggcaaggcgtgacatgacactattgaaccatgtgctcggagtattactcaatgggacattgctacatagttatttagatagtagttaggaccccctacttagtagaagatactaattaatacaaagaaaagactccgaaccttcgtagagagtacatggagttccaacgatccagacctcgggaggttgattgcccctgaatccccaaaaataaaactaaaaagagctttagagcataaaatcacccttcatcttaattaaacgctagactgttcccagcagtgcacggtgtccaatttctccagcatctctctggacctttcatatttccgcctccctactttctgcagaactcacagaggggactgacaggtacgcgtctggttgttgatgtgttcttatcgatacggaaaaaaagatacttagggggggctaacacttgacttttctccacattctagtcatctcctattttacgcttcatgactccacgcgctatcgattagcacttcgaatacattctattttcgtttcacctggtgcggttctcttggggagagagagatggccgtctcaccgccagcatcacccactgcacccccgcgccctatcagcgctgtcatgcgcactccgcgtagtaccagtcgtttaagtatgagcagcaggcaaggtggaagtcgtgcatcggatgaggatggcaagactgcagtcaaagtcggtatgtgcattcttccccctgatcggcccattccatgcaatcaaggatacacaacatcggctggcaaccaaattcaggactgaccttgcgcagctgtccgtgtacgaccaccactgaaaaacaccgatcctggttatgaattgattccccagagattccagaaacccatagtccatgtcaccgcgcccactagtctggccgtcgatgtgggcgctgcgcgcaaactatttgtgtttgatcgcgtgttccctgaaaccacggaacaggaggggatctgggaatatgttagtgatagtgtcgattcctttgttctgggttacaatgtctccattatggcgtatggccagtccggcgcgggaaagtccttcacaatgggtacctccggtcccacggagcagaataacatgcagaatatgggtgagtttgaaatgcgttggtttcccaatcaactcagggactgatcgtgtgtgtgcattgtgatttaggtatcatcccccgtgctgcacaggtcttgttcgataaactagaagggccctcgaaacataaccggaatagctcgcatccgactactggcctccgaacacctcaacgatattcaatgacttctgccgggagctacgggaagttgaatcacgagaaagaaaagagttggcagctgaaggccacatatgtggaggtgcgcgtttattttagggcttgtttgctggcagcgcattgttctgaccattgtcctacagatctataacgagcacctgagagatctactccttcctgaaacgacaaccacaaccgatcgcagcaacgtaacgattcgtgaagatacgaagggccgtattattctgactgggctgcaccaagtcaatattaactcattcgacgatctgatcggtgccctgaactttggctcggcgatccgtcaaacagattctacagcaatcaacgccaaatcgtctcggtcacatgccgttttcagcttgaaccttgtgcagcgcaagtcctcaccaacccatgcgacgccgagtcccataaaggagaagcgtatgtcgatgccagtcgacacgttcaacgccggagaaacagtcactgttgatagcaaactgcactttgtggatttggcaggtagcgagcgactgaaaaataccggcgcctccggagaacgcgctaaggagggtatctcaattaacgctggtttggctgcgctcggcaaggtcatctcgcagctctcctcacgccaacagggctctcacgtctcgtatcgcgactcgaagcttacccgactgctccaagattcgctcggtgggaacgccttcacgtatatgattgcttgcgtgactcccgccgagttccacctaagcgagaccttgaacacaatctcatatgctcagcgggctagagccattcaaagcaaaccccacattcagcaaattgcagacgagggcgacaagcaggctttgattgaacgactcaagtccgagatatctttcttgcgcctacagatccgcaactctgaaggatccgagcgccgtgaaggaggacccactgaacgaagtgaacgtaagaacgaacgtgaaaagcacttgcagaatcagttgttagacgtccaagaaagctacaattccctcagtcagcgccacgccaagttgatttcgaatatggccaacgattcgcactcgcctgctgcccacggcgaaatggacgacgctacctccgaaattgggaagaactcggttgagagaatgcagcgatcaaggtcctttgccgagtctgtggagcagatggttctagagtacgaaaagaccattcaaagcttagaatcttcactctctgaaacacgcgcctccctctctatcacggagagtgatttgctcgaacgcgagaccaagtgcgcctatatcgagacggtaaaagaacagctccagacccgggtccagaagttgacggaccgagaactcaacactgagaactacctccacgaattggagtccaagcttgatggccactctacaggcgaggagaaacacgctgccattgttgcggaattgcgcaaggagttaagccgggcccgcgataacgaggccagctgcgaggaatacatctcgacacttgaagagcgacttgcggagggtgatcaggacatggaacttatgcaacgcgaggtgatgcgcttggaacatgtcattgagcgccagcgaggcctcgggcagctagaccgcctactcggcgagctggacccagaaaatggtggggatagatacgacgttgccaacggcactgactaccaacactatcaccagccaagccgtttgcaggcctctcataggcacacgccctctctggacgttctcagcgaagcagcggagacagccatcccggagtcagacgaggatcttgtcgagccgaccatagaggccgagctcgaatctatcggagaatccgagcaggggacgggtgaggacttgaaggttctggaaactgcgactagcaagctggaggcacgtcgcacggaggctcttcgtgaagacccgatcgcaagccccgctcagtccaaattcgttgccgacaagcttgagactgtcacccaggagctgctcgacctgcgtctgcagcatgagaacaccgttggtgacttcgagaacctcgaacacaaataccagcaggctctcaaggcccttgaagagcttcgccaagacaaaattgacgaagcctgccacccggcacctagtgttcaaaaccaactttcaccgcgcccggtgacttttttagagaatggaggcactccgacctcgaagcctggagaaccacactcattctcgcaatcactctcatcggaattatcctcggtcggggagcaatccactttgcgcgcattctctgaggacgaatcgaaggcaattccatccatgccctcaacccctcaagtgcaggtggactccgaagagtccgagagcatgcgtaatatgcttgctgagcatcaggagagtgctgagctcatgacccagaaatatatggagttgcaaaacgagcatgagcagattctcggactggtcgaaaagctgaaggccgaggctcgcgccaagtcgaactcaccccctacaacccctggcatcaaagtgatccgccgcatgactagccagaacattctgtcaggagttgaccgtgcaaccagagccattactgggcttcggctccttgcgtccgaggagtttgctgacaagccggacgctatgctcaacttcgactaccatctggatcaaaccatgcacgaattgcaaagccgcatggagcgcctccaatctctagaagccgagaaccagggcgttaaaaaagaaatggaaatgaaagcaactattatctctggcctgaccagagaacgctcgagtctgcagggtgcttcgcctgtggacatggctttagtgtcgcaactgcgcgatcaagtcgtctcccaggaaaggcagatcaaccaccttcgagacgctcatgaagcccgccaaaaggaactgttgactgagattgatactttgaagggacttttgaagtctcaagagaacgctagccgggcactcgacgccggtgccgaggagcaggaccggaagatcggtgctctgcagggagagctcacggagtggcaaggcaagcacaagagtgctctagagtccctgcagtcctcggagtcgcagctcactactactcttgctgagctggagggtgctttggcttcggtcgctgctatgcgctctgagcgtgctgttaccgattccgactctaccgagaaagaagtcactgcgcaagagcttgagggtggccgcgccgaacagcaggagcttgtggatagcctgatgaacaacatcgaggatcacaagtctactattgctacccagcttgctacgattgccgggctggaagaatccctctccggtgcccgggaaaaactggcttcacagaccactatcgaggaagagaccaataccggtgctgttgacctgggtctttcttctcggatggccgagcttgagcagcaaatttccgcccacaaatcgtttgtcgattctcacaataatgagctagctacactccaggagtctcacaagcgtgaactggccgagttggaggagcggactaaggccgctgcccaggccgagtacgatgctcgtctggctgagaaggatgctgagcatgagcaatccatggcgactttgcagaatgatattgcagagtctcgtaatgagttagtcaatctgcttaaggctgtgtcgactcttctcaactctgaagtctccgccgagaacttgacggatcagatccatgatgttttggtccagaagcagcacttctcagacaagtatgccgagcttatggacaccaatgaacaccttcgcaagcagcttgaggctaacgccgatgctgagagtcgtctggacgaaataaccaagaagaacaacgtccaggacgccaaggtcaatgagctggctctcttggtagctactttagaggatactcttcgccagaaggacgaacaggtcaagaagaaggaagccctggtcgaggagatcacaatcgagaagcagaagagtgtgcgtctcgtggaggagctggaggaacaaattacaaacagcttcgatcagcaccacaaccgtctgtccgtcattcagcaggagcgtgatcaggccctggaagatgccaaagccaagattgtgatctacgaaggcgacatcgagacgtaccaagtgcggatcgagcaacttgagcttcaaatcaagaacaccgaaggctcccatgaccgcagcagctccctcacctccaaccttcgcaagagctcttccgccgcctctcttccctcgcctccaccggcgatccctctccctcccctccccactatcgcctcgcatcccaacggcgcttcgagcgtgtcgccgcccagctctcgacacgccagcaaagagctgtcccatgtccaaatggtcgaggagcaggaggctcgaatccgaacaattgagaagcacttgtacgccgagaagcagctgaccgccaccttggaagaggccctcggcgaccttgaactccagagtaccaaggtcaagaccgactgcgaggcctggaagaagaaggcctgggaattcgaggatgaactctccaacctccgcaaggaacgcagctctgcccgtctgtccctccaggccgtcgaagaggagcgcactgcccgtcgtgaggccgaggctgcgcgcgctcaactcgaagcgcgcatgatcgccctcaacaagaaaaagaagaagagcaccctcaactgcttctaggcgtttttgactctgaccttgctcgcgtttgagctgttccagcgtcaaaagcaatcgcattctcattcgtcttaatcgttctgtctggttgtacactttttaccttctctgttactcttgtcttctttttattttttatttttcttattcgtcccttgtttcataccccttttttatttgattccaagcagttagtcaccgatttccgtattatgagctttcacgtttttgtcactttcccctgtcgattccgtcaataccttgtcctccttttctcactccattcttcacatatcttttctttttctacttgcactcatgaacctatcatgacttgtagatctttttatcgcccttctatcatccctacgctgaataacctcgatgttgtacattccgtcggctgtttctagattccgttgaatcttcatgtcgcaatcggggggaatcttgtcagctctcagttgcttttctgcacttgaatttcatatgaatgttccctcgttcatcttgaaattcttgattcgtccattcttatcaatgaagttaccaatgccagcctacttattctttctcgctgagcctgtagagtacaaatctgataggtttcgaaattcactccgtgaatctgactgagtaaagagcaagtagataattcgagcttcatactgcttcgttgaaccatttagtaagatatcactctacgttgtcttcaactgctttgcaccgatgactatattggatactcggcatgatagtacgactaacactaagcccaccacggccttaagagcaccgcaatccaagggtctatatcctaggtattggacgttacaatgagctaaaacatcatcgagactaaatatcagacaaatggatcaattgaatttgtgtaataacactctggcatattcgcatcacatgacgcgtataccccacgtgtctttaagctggttgcaacggcagctccaatctccaagctccaaaaacaactcaccatgggcctccaacggtccgatgtgacaataatccacccagatctgggtatcggaggtgccgagcggctaataatcgacgtcgccctagcccttcagagccgaggccaccgcgtaactatctacacctcccaccgcgataaggcgcactgcttcgacgaggcgcgcgatggcacgttggacgtccgcgtgcgcggaaacaccatattccccgcccatatctgcggccgactccacatcctcatggctgctctgcgccagctacatcttaccgtgtcactactaggtgagcttgggacaagggagaccccggaggcagctactacaaccaccgatgacgaggatgaccgcgacgatatcttcattgtggaccagttgccggcctgtgtgccgtttttgaaatcgttcggccgcccgcgcccgtcccgacgccagcgcatcctcttctattgtcacttcccggatcaattgctcgcgcgccgagatgagggcggctcgcttcttcgcttggcgaaggtactgtaccggtttccctttgattggtttgaaggctgggcgatgagcgcgtcggatcgggttgtcgcgaactctagattctcccgcggggtcgtgcgtgacgtctttggctcggaccggttgggtgatgtggaggtggtctatccatgtgtcgacatggatcccggggtaccggtacctgagaaagcggaggaagaccctctctggggtgggaagaagatcctgctcagcatcaatcgcttcgagcgtaagaaggatatgggtttggcgattcgcgcttataatggactgggagcggagaagaggaaaggaacgcgattggtgattgcgggtaagaaactgtgcacagatttgcgatttgtatgaattctaacatcgtaatttttaggcggttacgacaatcgtgtccacgagaatgttcactaccaccaagagctgaatgagctcgcgaccagtcttgggttgaagaccgcaacctccaggacagtgctatctgcactttcaatcccggagaacattgatgtcctcttccttctttctgttccgactgcatttaaagatacgctgttggcacaagcaaagctccttctctacacccccatcaatgaacactttggcatcgtacctgtcgaagcaatgcgcgttggtcttccagtgctagcatctaatactggcggcccactggagacaattgtcgagggtgaaacgggctggctccgggatgcccacgcagatgaagaatggactgctgtgatggacaaggcactttacggactgagccaggaggatcttcagcgcatggctcttgctggcaagaacagggcgcaacaagaattctcactcactgctatgggcgataggctagaagaagaaattgccaccatgctgaaagctgaaagaaggccatttaatgggtggcagcaggtctttgtcattcttgcactggttggggctcttcttgcggtgatggctgcagttttacttcgagtgctataatgcatagtttgcgtcacgcattaaaattttgtactttatattagtctatagattaatctttctcgagttgcaccagtttcccatctcctgtactaaataaatgttttgtccacccaactttaccaaaacactctcacatccaagtcacatgacctcgtgtgttttgctcgcggtgacgtcgcgtccccctctatctttatccttaatcggccgccctagtggcattgggatttctcaacatgcccgaagtaatagaccttctatcctccgatcctcctatcccgccaaaaccccaaccgcaacagcaagccgaactcccgtcgcgacttgcatcccaccagctcaatccgatttcgtcagacccgttcgatacatccctgttcgactatgaagacatcttcgacaagccggccaagaaacggcgagtgagcgatcaagacacttcttcagtgcgaaaaagcaccacgccaaacgagcctcgaggtccggcttctacggcagagccatggttctcgatctccgatgatgattttgacctgccgccagtaaacaccgcggcgaaaaaaaccacatcccagtcgcgtgttgaagagtcggatccaattgtttttacctcttcggccccagctcccttgaagccttcgtcgcggaaatcgaatctttcaacccgggatattattgcgcttgatgacgatgacttactgacggatcccatgaaacctccgccttcgagttaccgagggcgtagcgatattgatgaattcagtgatccgttttctctgccggagttttctgacctactgaagaaacctactgtctcgaataccatcttctccgagtcgactgctcgcctattatctcgccttggcgaagataattcaggccctaaaacaaagtccggtactcgaaaacagaaaggcaccagcttggaatctaaggctgcagaggtcctctccgatgatgagattcatgaaccagtagtacccaaggcagcgaagaagacaagcaaggttactcccgctgaaaaggaagcaaaggccaaagcacgcgaagaggcaaagctgcagcgacaacgagaacgcgagctggagaaagagcgcaagctcaagctcaaagaggaaaaagcgaaagagaaacaacgggctgccgatatcgcgagcgtcaacaagctgaaagtgaacaaaaaggattctacaccagagatgatcgtcgacatggctacatctttccaggacagcagcgtcggcactcaaaccgtcgagttcttgaaacgactcggcgtccaacacacattcttcacaagcgcaattccccacgtagtaaaatggcgtcgcaaaatgaacgccacatacaacagaaccctacgccactgggagccctgtccattctttattcaaaaggaagaccacgtgctgtgtctgttatccgcgcaagagttcatcaaaatgataacccccccaccagacgacgaaggaagagaaaccctagaaatccacgtcctccgaattaaaagcgcctacccagagtgcaaacccatctacctaatcgaaggcctgaccgctctgatgcgcaaaaacacaaacgcacgcaacagagccttccaagccgaagtcctgcgccaactcgctgaaacaacggtaccagaggaacagaccacatccaacagagcccgaaaaccaaagaaaaagccggatgcgacgcccctcgtcgacgatgagactgtcgaagatgctctgctcgaactacaagtcacgcactcctgtctcatccatcacacgaccgcgccagccgactccgcggagtggattaagaatttcaccgagcacatctcgacagtcccgtaccgtcgtgaacgacaggaagcacacaatgctgctttctgtatggacaccgggcaggtgaagaccggcgccgataagaaagatactttcatcaagatgatccaagaggttagccgcgtgacggctcctatggcttatgggattgtgggccagtatccctgtgttgcggatttgactcgcgcaatgcggatgcatggccctctgatgctggaggatattaaggtaggtttctttttctttcaatcgctatactggtttttttctagatctatactggctttgctcttttttttccgccggattctctactgactgctgtagaaatccgcgaataaaaacggctccctgacgaatgcgcgcattggacctgctgccagtaagcggctgtacaaagtgttcactggactcgatccgagttcaacggacatttaggtttgtttttggcctcatttggttttttggttatcatttccatttttggcttgaactactgcagagcgtagctttgcattctggacgcatccaattggggtggcggattttcttttggttaatcactccagcacggagtagttggacttctaatactctgcctcgcctcgcctctcttttggatgggaaattggatattcccctgcaaatgagatagaattccttggctatgaggctgcggatgccagttggtgcaggatgcagtgatcacttttttcttcttgatggaaatgttgtatttggacatcctcgtaatatgatagaaagtatcgaaacaataaagactgcctagctatatgcaaatgccaaacccacatctatgcatagaacccattatcaacgccaatataaacgcatatgtcaaaacatcaaggacatacacaagatcaaatcaaatgcttccatactaaacactaaacaacaacccccctcctcttccaccccctccaagcagccacccaagccagaacagcaacccacacactaaccgtgcagccagcagcccagaacccatagcatcgccatccatggcactgaccatcagcaccatcaccgtcgccgcgatccatggcattttgatatgccgcggagtagataatgccccagagcgcggcaccagccgcaggcatcatggcaacgataccccaatttgtggcgaagttctcgacgccccagacgacagagatgatgataggcgcgagggaaaaggcgctgccgtatccgaagccgatcagcgcggttgtcaggttgaagatgcctgggtgcgctaatgggagaggggaggcgaggaggaggtagcctagggagaggaggaaggctgaggggacgaggaaggtcatgcgggatagagtgaggcgcgaggatgcaggggatgtgaggggcgcgtatcgggctccttcggaaatcgaaggaaagaggtgtgttgccgggggtgcgaagaagtcggaaagtgagcctgttagaaggcgcgcgatggtcgaggtcagggctatggttgtgacgtgggttgagggggatccggctgggggtgatgcgcctgtgggataggattgaggtgtgagggttgggatgattgtgcccagctattttggtcaataggttagttatgggttggagtgagattggagacgaactcacgttgttaatgtacgattcgccggggccggtgaccaagaaaaagcctgcggccagccaccacatggtcttgtcttgtaggaatacacgggtttcatagttgagcagccagttcctcttccggcgctcctcttcctcgcgctccttctctagcctttgctgctcacgttcttcatcggagaggattgattgctcctcatcagatgaatcagagaacgtgccgtactcaatcgcttgtggtcggaagaaatcactctcctctaacagtccactgcgctctagttcttcaaccgtctcatcaatatacttatcatcatcatccacgatgcgcaaggcaaaggtaccgatgatcccaatcaccagcaaaagcaccgccagaaagacaaagtatttataaacgtcgagatcgccgtgactcccatcctcgaggggttcataaaacaggtacgtcccgagctggctctgccacataccactgagaccgaacgcggcaatcggaacagcaagcataatccccttgtgctttcccctgccaaagttcttggcgcacgtcgcaatagctgctaggtacatgcagctagtccccataccaatggcgataaacgccacgatcatcacccagaatggctgaccggaaccacccgcatcagcaggtgggccacttttatatgtgaatgcagcgaggagatacccgacgccaaacaccagtcccgagaacatggccagtggcgatgggctgtagcggtcacacaagtagccgaacaaggggacgggaaggtacattgcgatctcggcagcgatggagacggcattgacctggagctgcgagtaatggagtcgggtaaggagaagatggccatacagagagaaagcagtgatgctgccggctcccaagctgcaaaacacgaatataagagtcagcttccaggatcccaatggagatagatcgtctcgtaagcatggctgcaaggaagaagagtttcccataccaagtaacaacaccccagccaaagctgagcactcggataacctccttctgcatcctccgtctgtcccgctcgacaatctcttcgacgacatcgctcaacagcccgtcatcactcagtccgtcattaccggagctccgtgaacctcgccgtgaatatcgccatgacggctctgcgtttcggtctgttgtatcttgttctgcatcaatattttggaggagcgggcgattcgcgtcgaaatcgcgcttatcgatcgtcatagtgccttctccgcaccggttacgctaggctgtgcaaccgactctttgtctgaggggaagtgtaagatgggtggtatagataggtatggaaggcgggaggcgtttgagatagaactatatggtgttcacgatttggcctgatatgtacgctgagtacgattgtccgtgtgatagagcttcaagggtggagcggtgtctgctgggtggatcctgaggttgcgttgttcaatgctacgtcattggagttcagctttcgatcccggggagttatgttcaatgtagaattgtaggtaggtaatatatgtgatgctcaaaaggcgtagtcgtcaaggcaagctgaggaggacttcagcggagagagcggagagagttggagtcattacacgtgactcattctacaatacccgatcacgtcattgtacggagtaaaggaatacctatactgtgatatagtggaaacgaagggaaatacaccatctagagataaaaaggatattcatgtacaagtaataccataggataacaacaggcagaccgaaaaaaaggatttgaagacattggggggtattatcaatatcaataaaacagaaagaaaagaaactgatacacgcccgagaaaaaaacaagacaaaagggcttccgagaaacaaaaagaagagaagaaaaacaaggccaaagacaaaataaaaacctcaaacgactctaaatgcatccaagcgttgacggggatcatagaaacacccattgaagggccgggtcgttatttcgtagtgccgacgatcaggcgggatcaggcactggtgcatatgaatgctggcgttccgatgtggaaggatctaccctccgaacgccacgtatcggcagtgggccgagagatgataaaaacaaaagaaagcaaaaggcgaaaaaggaaaaggaaaaggagctagaaactgacttcgcccgcgtcggtttctatcatggtctcatcccaatattgagaagagggtcgctcacgagcctcgggttgagagcccagcgcgatggcttcaccttcacctcgttccacgaattcgtccagactgacctccttcataattcgctggaaatacattcggagtgtgcggaggccacgcagatatccacgatcaatgtcgtgcgggctgtgaggtgggcatggcgtatccggaggaagcttgtcctcgccagtgatgcaattagcgaaatcgacaatcttcagttgaacgttcagtttgctctggccgtctgcatggtttccattattagaacgcggcggttcttgctgaggtggagattgtggttctccgtcataaagaatcaacagactgctagcatagagccggtagctactcaactgtcgaatcatgtgctctaacaaagctaatttctccagaatgacagggatctttttggcaacactggcatagctgacaccatcgtataggaatcgagtcagcgcatcctgaaattcacgaccagacttcaaatctcgcccgaaatacttgtcttcaaacatgtactcctgcttcttgacgttccaggactgcatgccacagagccgcacacccagctgctgcgaagtagtggactgacatttccgtcgctgagacttcttcttcttctcattcgcctcgataccatattgacgggtgcccatcttcaaatccagcacgcatggtttattcataccagctgtcagatcctcaaggaggaggaagaactgcactctttcgtcctttctcagctgcgcctctttggggttgctgggcaagatcgtgtcgataggctcctgtggtttgaagcgcgttggatcagaagttctaccgaaagcagcttcggttgcgtggccaccattggtcgagttattttccgacactgggaccgtggaggaaccattcgacattgaggcatcggcttccatggagaaaatcccatcctccttgtcaccgccataatcatcgtcatcgaagaacatgagttccccattgttgttagagtccatggtaccacgtctccgaaggccactcccggaatgacgccgtcttgggtggtgaacccgagagagcgagcttgctcggtcaggctcttcggtccggatcttctctagacggttttgattggcttctagggcagtcgaagccgacgatgaaagagcagagccttcactaggagtcacctttatgtcaatcgcttctgtctttagcgccgcgactgggctagggactggtcgttgattggtagctgtgcagtcttctgatagattctctcgacggtgcgtggcgcccggcatatcggaattagctcttggcaaatggacatgaccacgagcatgtcgacgatgatgatgaatggcaggagggctgaatacctcgcggagaacctgctcctgaagcttgagattgacggtcgtggcgccccagatcttggcccgcttactcataggcgatgtatcagactccgctgacatacctttcagaccgtcaacggatcgtgcgcggctcattgaagcatctgctgtccgcggtcgctgctgacgagtaaaaagatcggcaggaattatatggcgattgttctcaagaatgaccttggggatgactcctgtgacttgggactggctaacaattcgctgtggcggttgttgctttgctgactctggaggctcagagctgggcgttgaagttccattggctgtcggatctggaattattttatcggcagaatcgacctggtcctttcgtttggatgtcttcgaaaaggtgacattcaacactccgatgtacctgatcgaaatattagtatttaatatgctgataaccgtctgatcttcgtggaattgattttacatacttgggaagaaataccaacatatctgggtgcctcagttcaatgcgttcgtagaactcgttctctcggttgttcaactgcttgcatacagcgcgtctggaaaagcggaaaacagttgtgtgcccgccaacctgatgtcgatagggcttcaattccacggcaccaagaggccccgggggcgggggtttgggacgagagagaagccgagaaggctgggtgggtgtggcactcggggtttccacctcgtcagcagatgggatactttcatctgccgattggggttcgacttcggaatcgtagattgaatcgctgcattcagagatggtactcaaaggcttttctggcacattctctcgttgagaatggatatcgccataaaggatcttactttcattcttagatcgaaaggatatatccacatggctgatttcctttttgggagaatcgctacgctcttgaggtactaacatcagctcatgacctttctccgcagccgacagctgacccggctgtacatgaagagggctatcgggaaattgttgcaggccctcaaccccatcaggaaccgtacgctcgtgggggaagtaaacggcagaagaaatctgctcgttttcttcctcctcaacctgaccacgctcctcttcctcgaaagagttagacggggatacctcggcatgaagatcgctctggaagtagtcacgggcgcgctctgaatattgagtgggaatgcttcttgagaaagaagacccatggctaccaccaggcgtgagatgaaagtttcggatctcctctagcaagctgcgaggcaaggctgtagggccacgcttggaggggtcatcatcgtatgtggactgagataattcagccgggggaggttggaaagacggggcatcgccaagtgcggagagtgatgtgcttttatgaagcgacgtttcctgctctgagcgatatgattcttgttcatgttccatgatgcgatccctcgactccaacgtctcatcttgtggtcggccgcgatcctcccgtcgtttgcgatccggtgaagaagcagtgttttctttgaaaaggcccaggtagtggctagacttacgactgcgcacgttagaggccggctccgggttggtaaaattggcctcgatcgagctgtcaactcggccacgacgacctctgctggggcttcgctcaagcaccacaggggtctgaggtttttcttctttcgcactgtaggataagggatcctgactgatctgagagccctcgtggccagaggttgggatagtcaaagagtgagaggtagacacatcatctaatgcagacgggaacaatttccgctcaggtaaagtgccttggaaccgactggtcttcgtacctgtgttatcccatggcaccttgtatcgctgggatccggccaaatgaggcggcgcacccgtctcgacctcggttttctttgagcgaccagtcggcgaggtcggtgtgcgcagcagagacaaccgagggaggtcggtggatgagaagagggtcgaggaacgcaacggagaggttctgtggacgtcaacttccatgcgggaagggtcgacgctataacgatggggagagaccttggagaatgcacttggagacacggatgcatcgtcaaggctagggatcaagttgacctggcgttcattgcccaaggccttttcgggggggagttgtggggtagtggcggcactatcagaggggaggtaatgagtagcgaagatactgtcacgttcggacagttgaggcctgtagacaatatcaggctgcgcggtgttctccggaggtgtggtagcggttctttttagagggaatattcgggagacgggctgagaccaggaatgggcggtgggggattccgcgcgcgacggtgataaaacctccccagagccccgagacaaatgagcttgcggcaaatggtgacgtgggccacccccgatgatattggagcaatcatgttgggccggtgtagcaggtgtcaccaggggactaggcaaggtatcttcgggaacggacggcgagtttgacatggggaggacattggtcaagcacaggacgggatggtatggaagcggaaaccggaatggttgggcgtaagtaaaaaaaaaggaagatttaagactaagagagaagcctagaacaaggaagaaagataggcgggttagaggaatgtctatctattggcaatcaaggggaaagagttatgggcacgttgaggcagacagagatcttacaggctaaaggaaaagccgcaaatcggtgagaaggccggaggatcaaaagagtcaaggggagttgcagggaaagggaaatttgaagtttgcgagagaccagccttgggatcgtcaccgcccttgagtggatccgatttgggccaaaattgggataaaaatgggatgaagatgatattggagattgagaaggagaggaagaggcagatcaaggcaaagaaagatgaagtcataagagaaatatatgggagtccatggcacgagacagtccaagtacagcttctatgagtacccggcctatcattgtgcaacgtcttacgaacttcctgactactgactgctagggttcccaggctagagatggagattattataatagattgaatcgagatctcgggatgatattagggatatttagaatatttagggatattcaagaatataataggtattgtacaaattaccaagtaaactcccaaggttctctattataagatctatcaacttctacaaaccaaatatttatggctatatcttttgattcctatctgccaatcatctgtctcaattcatagtgtgcagccatgtcgatcgctaataggtgattcaggggatttctgtaacttgacatctcgacatcttgacatctacaacatagtatcctaggacggagtactgcataccccgtaccttaataaatactagtccagtctggggttaagctcgtagactaaaacgaccaaggcttttcttctcaccagatggccccataagggaactaaaagaactaaagcccccccacttcgaaaagccacgcagtgaccttatctcccgcggtataaaaggtaccatagatatgtatggatttatactggattactccctattggtaacctcagcacacttgattatattcaaatggataatccaagacaggaaacacacaaattcaatccaacagcgcctaagatgtgattgtgatgagataaagtgattgggagccgagcgcgtcgtgacccaaccagagtgctcggcgatgtgaaacagatgcattaggggccacggaagagactaggatggtgtttctcaacgaaccagcttcttcgtagaagaaaaggagaggagatccccgcagacctccgacttttgtactccccgctgacaaggctcctatggtctacgactccttagtttactgtcggcctccttccaccatgcgccttctttcacacttgaggccctataggcactgggaccttataccttccatttcccatcgcatgtccttgagcacgttctcccttttcgttcatcccataagaaagccgttgagtcgtatgtcatacaaggttcttccttcaattatctaccttgcgatcaaggccaaatctactattttactcttgagaagatctccatcagagttatatctattcacttgataggaggttcccgagaaatatactgccttcaaaaatgagtcgcttgaacgtggatacaggaggaaatcacgagaggtattcgtttatggaaacaccactcgaaatgcacccttcatcgcaccaacagagtctatcagcacttcctccagcgggcgcgaatgcgcacccacagcatcctgcagtggacgaacagcagaaagagcgacagcgagcatggtcttatgtaccgagtgagaaagaacaatttcagcatcaggggataatcccggactatgccaaccgtccgcccctcgagcagcacccggccaattatgcgcctttggttcaaaaccaggaacagcagcagcaacatagcacttcaatatctcctcagacgtccacaatcgcgcccgagcagcaacaacaccatacccaatcctataccagccagtcttatacaaacgtagccgaacagccgagtcacacggtgtctccccagacatatgcgagtcagtcgtatacaaatacaccagagcaacagcagcatcaatggcaccaacagattggcatgaccatatctcctcagtatgcgaacatacccgaacgacagcagaacagcaccccgatgtctccccactcatatgcgagtcatccatatgcgacgcagtcataccacatcccgaatcaacatcgcgacatcgaaataccctcccagcaatatgcctcgtataccgaaacccccagctcgccacccccgaactcaccagggccactgcccctgaaagtaaaccccgaaggtccaccacgaagcgaaagcgtgcccattgttcccgacgagaatcccctgcagtcacccatatcgccctattttcctccgattactagaccgaaaacatcgcatgctccccagccggatgatctgagctcataccaccagcccggccaaacaacccatccaaaccaggagataaagggcggaggatggagcaacggactgtgcgaattttcgaatttcggaatctgctgtctaggactgctatgtccgtgcattttgtacgggagaacgcaacaccgactctcgatgaaatcgagaaaggaagacccgaccaacatgctcggctatgagacctgcaacgggtcgtgcacggcgatgggactactatgcggatgtcaatgtaagtcgaagtccaatttcaacctcagttttaagcttgagtgaatatcgcgaccgagcaaccgagaaagaaaaaagcaccattctgacaccagcacaacagggttactggccacggtccaacacactagaacgagaaaggcatatggcatccagggtagtatcgcatcggactgcgtgcgggcaacctgctgtacatgctgcacattgattcaggacgagaaggagatccagaagcgcgaggagtatcgctcccgagcggctagggaacgggggacgactctgctctcgccgtatactactcccgggccaatgtcgtatggcccgccacggagataatgcgccatggttagtgaagagcggtttcgatggcgtggagtgtctctatgtatatagtttatgcattgtgatgtaatagcgtttattatttgatgtatgtttttatttactcgtagggacagaggaatccgtagcctgtcagcattgccaatctaccgacaagaattcaagattgaagctggcagttacgtatgaaatctactgctctcatcaattttgcagataattgcatgcggttggtgagatgtgattcatcatattgccacctacgttggaaacagggcatggtgagggttgagatcaggttaggcacaagcagagaaccaaacaggagaaatcgattaaatctggtagaatcaacgagaaaatgcatatcttcatctctaagcatttactagcttaacaaccaacgtgtaatcctatggccataggtatccactcaagctctatagtttgaaagccaataattgaaccctttcgcgacttttactagacatatgtccatagacgagtacgaaccactaaaccctcaataagagtactcaagggtctcgcccaccacttatcaatcccagaccgggcattcgagccatggcagcaggccaccctccaaggtatggaaggtagcaattcagttcgcaatttaaggtagagtacagagtactaccgacacctagtcgcccctgggatgtatcatatcaataaactcaagagaggtcgtgcgatcccacgatcggacaaaccaaactggcgggtcgacaccgatctcaccggggcgatgggtcgatgcgccacgatgatccactaagtggctcacccattccctctgaagagtctacggagtcccttatgtgtatccgcactgcaacctcggctgtcaagctagccatggtaatatgcaaggcgatgcattgaaggggcgcatggatcgtagatatcttcacgtcaaagctgatgtatcaattggtaacgggggatctcttcctcggaaaaggttgatactagtcgtcaaagcccttgttgttccctgagtaggttttgactagttgcactgacgttggtcggctaatatgtaagggtgggatatatatcagctactactgtgggagagcagccattccttaaggttatatccaaggtgagacctgttcatttgttcgcttctgtgtatatagttgatctaggattcctgcgtcacgctgatatcggtgcttccactcatttggagagtcactctctatacttggtgatacgtgcaatatggcggattcagtggcccagaccatccatggctatgaacatgataacttgcgccatgtggttgtcacctcgacttgctttgccttcatcttgtctactaccgcagttggattccgcatcatctctcggaagatcaacggcagcggtctttttgtggatgactggctcattatcattgcgttggtgagaagcacgccttgattgtttacgacaaggctaacttgcaaacagatcttcgaatacggtatatcgatagcaggagttgtttgtacgtcgaatatcattcacctaaaacagccaggagctaacgcacggcagtactctacaatggactcggaacccatatcgtcgagatctcccccgaacagctcgttatctacttgaaggtatggaattgcatccgattcgctatgaaacgcatgcgtgtactaatagactcacagacactgtttacaggctcgatcctctataccggctgcattgcaagcatcaaactatccatcctgatgctttaccgaagactgttccctgtcaagagcatgaagtacgccgtcagtattgtatctctgattgtgattctgtgggctgcctgcggtattctcgcgggctgcttcatttgcatcccaaccgagaagctgtggcatcccatgctaccaggtggttgcatgaatctgtcaaaattctactacggtcttcaagtccccaacatcgcaacggacgcaatcatcctcctgatgccgatgcacattgtgtggaaccttcccatctccaaagttcagaagcttggtctttccggtatttttattctgggagtcttgtaagattgtactgtctctattcgaagtgctcttctaattaatgcaggactttaatattcgacatcattcgtctggttgtcctgattcagctttccacccagggtgaagacattacctgtacgtggaattattccctaacccatatatgagggctcctcactgatataaaaatagataaccaagtcccagcaagcgtgtggacttgcatcgagcccgctgtcggaatagttgccgcctgtctgtcaaatatgcggcctttgttcaaggtcattcataccaaagtctggtctaggctttccagccgatacgccacccacacgaacaatcccagtgattcacagattaacgagaagggtgtttggccgcgacagacacctagcccgagtaattctcccagtcccagtggtgatttcgaccagtcgcctactcataatcagtctgctgtgtaagatatgatcgggactacatctatatggatcggattttttttgcctttttacgaaggggggaggtaccgtctcattcattcctttttgtcttttgtctttttacctacaacgagaaagccaggatcgatttgttagcaattttctagatctttaagaggaatcgaacataagaattcaaacagagctattgtcttttgtccctattaagtaattttcagccaatcgacaaagtcattgactcagtgcaactagcagtaccggagacatgaaagagtggaataaccacccgaggagaaatgacaacgaaacaaaggcttttatagcctttggtacctttatttctccacagaaaggagttcaatgcttagctagctgaacatcagccgaaaatttcataaatagctcccattgcagcaatttccctaacattcaaccctctaagaataagttccgcactctaattttctttcagtccagctgatttatcattgataagaagacctaggtaagttccaattcccgaccctgcttagctccgagtttctaaaagatgtataactgtgagccagcacgctcgccatggcaaaaaagcttccaaatggagtgccgcatttttgtgaaacaggcagaggctctagctaattacaccagaaaacatccggaaaattatgattatgagcaaaactgcaatgttcatagagggcttatcagactatggtctcaaatagcgcgagtgaaagacactgggcttgatatggttgcggaaaccccgagatgtcctctcgttctaaagcaacgcagctattggttcatccgggatcttgcagaccagaccgagtttgaagacgattgcgatgagatagaggcccgtctggaggcactggcggtaaaggtccaaacccgcgagttagagaacctttggattgctggagtccttgagtcgacggctttgcatattcaggacaaattccatgtatagattatatatcttgttggaattggtgtgtaaatttgtatggattcagcataaattcgagccttcattgttacatcacatagagtttttatttcagccttaatatataagcccgatagcatctttcattgtgacatcaactcaacactatattcgtcgctagtacatctatggcctcatcctcaaattgcctcctatgcggagtgcagcttttgaggattactgacttccaacagataaattcaccccgtcgcattgatttggtacaagaaaaacaatggaagcaccataagaaggccaagcttaaacatgtgatggtcccatcaaaggaggtagaggaggcagaatttgcgaagtatcccaacatgtggacatgcatgtgtcgagccagtgagttttatatagtcgcgccctagacccagtttaccctaacagacacagttatcaaagagcccgatagcaaatactttctgagcggtatcactgcacttgaagaaggataccctaatcccgggattattccaaaaaaccccggcatggcacgaattggtgggagaagacttgaaaccccccgatacgacgacaccttcattcgattccatccagcaatactcgaaagacaaccgagagagtacaaacgcaaaaatgtcggattcgttgtccatgcccactgctgggttcttcttaaccacatcataccaacgacactgatcgagagcaaaatggagaaattcgttcgcgctgcccgacaatactggcgtagccgcgaatcgtggggagctaatgattatccgttcaggatattgaaacgtaggcagacgagacttaggattcggtcgggatattggcagtggaaggattgggatccaaaggactccaaatatgcctgtgatatttacaggagtcctctcatagtgcccgaagttcaaagagcaattgaaagcgcaaggaagaccaagaaggaacgtgtgcaatcccgttacagtgacgtgccattggaagttgcgattatgattgccgagctcatctgccctgttgactatacaccggctgatttgaagaacacacggaatatgctttctgtattgcagtggacattgcctgattggttttggaagaggcggttaaaagaggagatcttcattgagttgaactcactcaggggggccaactgttcaatcgattggcagggcctacggcttgatttgatgggtcttgtttttgataaaaactggtatgttttcagcggtttgccgaatcgtgagcgggtgcttggctttatgacgggtatcaagtcgaattttctcgaaaagtgttgagggtggaatgaattaggaggacttgctatattagtgatgtgaaatgaatcgccggttaggtataacggactgtgatggctctttatgaatgttaatactgctatctcttgctacgcttgtatttgtagaggcgctaatgatgggaaaggtactcagtacttatcacaaggtggagttatccgcagattgccacgtaccgggtactttatactaacatcgccattttgaaggtcaggcaatgccgcaatgccttacgcccaagcgaagatgcctattgcccacgccataattacagacgtgaacggttaacatcaaatatgtgcggagtatgtcctacacgtagcaggcgctaagacagcatccccgcccacatgtgtggacgtcaaagctccgatactcggtccaacgcttatccaaaccccgaagtgggaattgggctgcacggtctaatgccaaatgtactttttgtataggatgcagcccaactcccgacaaggttgggccgtgcgttaagccgaatagaggcgtctgcgggttcttaagaggcgttttctcctttgttttttttttttgcctgaatatgctcccttgagattgacgaccttcacgtacacccaacatgcgcggtctcgacgatagcactgatgtatttatacgcactggccaaaaggcccagaaacatgtgcggcttgcttgggagggcttcatcaattttgcggcacgggataacgttctcgaggttgcgttgggtttgatgtgagctctccctatcgcataaaactaacaatcaaaatgctaacatctcaaaagtatagccaatgcgttcactaaagtcgtcacatctttcgtcacagacataattctgccgattgtctctctactgccattcctgaaccgaaacatggatcagaaattcgccgttctctccaagggtccgacttacgaccagcagaatgggtataataccctatatcaagcgagagaagatggtgcactggttctggcttatgggtatgtggacccacctcagatactcatggaaggtctctcccatcgatcagttttatctcacatttatgcagactgtttgccgagacagttctcaacttcctgggtgtcagtcttactctatacgcggtcggaaatatgtacatgatgatctttcccgacaagatcatcaagcctactgtccggtgtccatactgcaggcagtatatcagtaaacaggtaagtggtctgatcgggtgtgagttttacctcggctaatcgttgattgtccaaaggcgcttcgctgtcgccattgctcaacatggcaagacggaagggaagacgagcctcggagtgataaaagctctcgcgaggaactggctggtgccgagccgagtcgtgctgggcaaatttcctaggttgtactagatgacggtggatttgtgaggtactgttaccctcatgtgcgcccacgtgagggtaacaggtacagacagtttcccgttgcaatttttgtgcagttgtttagcgagtccgattatgcacgagtagatgatgtgatttgatttattgttgttattgatcgagggccgtgaaaacctcggaaagaccgttggatttgatgaattgagatgtgaattgaatgtacaagaagctgtataatacagacaccagaatgccagatctagatttctatacctctatatcgaccaccattcgaattcagtcatatcctgtaccggcaaagtatgttgcttgcggcgccacgtcctgcgggcatgcttgatgaacgcgtcgggaggagaccaggctgcctcccaggtctgagggtgtcgcagagtggttttagattggagaataccaaagcggaaatcaaggggattgaaagtccctggaggagacggcagtcgcatgtagtagcggacgctgtcgggaatctcatcggccacatggctagtcatgatcaaggcttgatcctccgtgagaccagtgaaccggaattccgactccttcgaggagcgggcttgaacattaagtgcacggcgtttaggtctctcgccattttctaagaaatgcaagcacgcgttacgctgtgctgcagataggcccgagaaagcttcgtcgagaataacaatgtccggcttggcgacgatggcccggaggaaaagcacaatgcgttgttgtgcggtggtgagctcactgaagagaatttcatctgcgtatccaacaatgtgatccattaacgcgtatgtacctagcttgacgtgagtccgcttcgtgagtgacgggagaccggcagtcgatatttttggtacctcgcccggggcgtaatttggatccagatagggctggaagaattgcaggactgcggatatatcttgatcgcgttgaatgttcagcttcggctttgacaggaaggtctcggcgaaggcactctcaagtgctgcacggattgataattgacgcgggaagaacgcatggatctccggtgatgaatgtccaatgcgggactgcagttcgaagattgaaattcctggtttgccaggctccggaagcctggatcgtccgaaaagtttgacaggctgtgcatacgcttgcggatggtcggatgtgaccattgatagcaatgttgtcttgcctgacccgttgggaccaaggatcgcccagcgttgcccccgacgtactcgccaatgcagcccatcctttgcttcgccatttacgttctgttgccaattaccgagtactaccttatccccgtacttgacatgaactccttccatatcaatgactggctctccgcccaagggtgcatggacttctgtggactttatctcattcgtatgcgccactaaatccccaaggagttctttgtccaaaacaccagccttcaagtctgctgtacatttctccaatatttccgcttgctggtcgggtaaagagtccggcttagatttatttgcgacgtagctccagacattgagcgtgtcttcgatagctggctttggcccttgcaggagaaccttatggtcattgcccaaaaccataatgtgtgtgatccagtccggcaccttgtcctgggggcgcagagctagaatgagccgcggggcgctcttcttcgctaattcatgaagaaggttagagatcttcctcactgccaccgggtccaatcccactaagtagaggttagaatatcacagccatcgaatgtgaatcagaaacacttactgaatggctcgtcaagaagcaatagctctggtttgcttagaatagcctttgcaattcgcgctcgacgagtttgaccattgcttagactcgagactggcaagaggagaagatttcctagctcaagactttcaatagtccgctggagagagagttcatcgtgtagcgtgccattttcatcgccctccatcggattcaaggaggtctgcccacgcaaatattgcagcacggtccagtcggtttcctcccggtgactctcatagcgagcactgagatatgcgccacggactcctccaatggcccccgagccctcgccgctgaaaccaacatattggaccgcattttcaatcacgcgtagccgtgggtctttttcggcgatctcgtctgtgaggaggtacggatatgaacgtgccttgggcgggatacagatgtgttggccgcggaggatatgcaggaggtcggttcgaccggctggaccgattatagcccagtgttgcggaggtgcctccttggttgcaccgttaacataaatagcgggcagagtgaagttcaggtttgggaaaagaggtggattggacgtgtcttcggaggttgggtatttcttgtaaaaggttccatcttcaatacgaaggaatgggatttcagacttgaaacgggtcgggcggtaagccgtgagccgcaatgccctcggtcgcaatttcgttcggagtagcattgtcgccatcaacttcctggaaacgtcgcaaaagtgcggagattggagattggagattcggggttaacatttacaggtcacgtgacctcaagctgattcggccgtacctgagcctcaaacagatccatgattcgctacaatacagttacatggtagagatcacgaaggctgtatatttgcaatggctaataatcgaactaggacatgatatcaggacttgtcccattatatcatgtgaccatttcaatgtccacttttctgcctcatccgaagcagtcaagtaacatcaacaaccaagtcgtagataactaatctgaatctgatattgatcatctctaagcacatggaatattctctcggagattgaaacgcctgaatacctcacgtgactgttccgatctgatcgcatccgatcccggggccggatagccgtctgtttcggatctgcatcgtgcgggnnnnnnnnnnnnnnnnnnnnnnnnnnnnnnnnnnnnnnnnnnnnnnnnnnnnnnnnnnnnnnnnnnnnnnnnnnnnnnnnnnnnnnnnnnnnnnnnnnnnnnnnnnnnnnnnnnnnnnnnnnnnnnnnnnnnnnnnnnnnnnnnnnnnnnnnnnnnnnnnnnnnnnnnnnnnnnnnnnnnnggggggggaggggggagggggttgcatagcttgacatttcgacgtgtcttatatctgctgtctttgggacaatccgaagctcaagcagtggacagaaatacttggaataaaagcaacatatatctattatcatcgccggcaagtcgtagtacttgaatcctaatataaatgtaagccgacggctaatggggcgggtgtggccacccgacggccaaactctcgggacccgattatcagaggtcgtcatggaccttcccaagcttatatagcctgctcttatttcatttccccacaaagcttccgcgcatctgtgctttccacctaaatctcacgtggcaaccacgacgcgttcatccgatatcaaatcgctgtgaatctccattcgaccaacatccaagtgcaagtatctacgcagagagaaagaagcaacatgccacccagcgcgtactccccggtccttgagaccagtcgcatcttctctgcgctgtgtgaccagtcggaacgcttcgacttaccacccgaggttcttgcgaacaaagaccgcgtttcgttctctaccagtcataatgaaatctacttcccaattccctttaaagagaccgagactctcgctgccctgaagggtatcgaaggttccgtggctgcggccattgccgacctgcgcttcggtgctggtgaggaacctcggggcattcaagtcaacctcgaagctgccactgcctttggatgccaagcgtacatggcaaaggttgatggtctgtcaaaattggacccagctgtgaaaacaaagctgaagagtatgtatttctgtagagactgatatatgggatgacaaaacaatattgactgtaacagacacggatttgctggctgcccaatccaacggctaccgacgtatgtcggcgaatctttacaagactaagaacccaggcgaatacttccatatccatggctctctggaggctacaaccaccttgaacatgattgggctcgagggccaacgaccagacctgactgattatgaagaaatcatcaaggtcatcgagagcaaagtacagcaatacacagctgcggagcttgaagatatgaacaaagagaaacgccaggccggtgtgactgcttacaaacatgaggactttatcaagactccccatgtaagtgttgcatgctgtatccgaccgcaacaagcaagctgatcattcgacagggaaaacttaatgtccaagagcctgcatggaaagtcagcaaattgcctggtgatcttcctccaactcctttcccagctagacgcaacggcagcaagaagatcctcgagggcatcaaagtactggagctctgccgtatcatcgcaggcccgactattacccgcattctagccgaatatggtgccgatgttttgaagataaccagcccaaacctttccgatgtgccgtttttccaagtcgatggtaacatgggcaagattgcagcagatcttgatttgaagagcgaggctggacgaaaggagtttgagaagctcctggatgacgtggatgtcatcgtagacggctaccgtcccggagcactagataagcttggctacggagcagaggccatggctgcgttggccgagaagcgcggcaaaggcattgtttacgtgaatgagaactgcttcggatacgagggcgagtgggctggccgcgctggatggcagcagatcgcagattgcgtaagttatcacatactgtctctactgtccagatcaaaactgacctcggctacaggtgactggaatcgcctgggcccaaggccagttcatgggcctctcaacacccgttgtacctccttaccccatctccgactacggcacaggctgcatgggcgccatcgccgcgctgactggtctctatcaccgcgcgaagaccggtggctcctaccacggcaaagcttcgctcatgcactacgaccttctcctctttgcaatgggccaataccccgctgatgtgcaggaggagcttcgtaaggtgcaaccgcctgagttcttcaagttgcgtcactgcgacagtgttgaccgcatctcgtcgaccgtgctgaagggcatgcaggagcgattcccgcacttgtacaagcctgccggttctgagtcggaaggtcgcaagccattgacagagttatggacatcgcgcgcatatggtgcggatatcgagattgtgaagccagtggtagtaattggcggggtggataatcagtttgtgcggtctagtcgtccgaacggatttgaccgagcttcatgggaggagtttagcgtcaaggagacagatgtgaagaaatgctagtcgtttccgcactgttttccttttcttttttagcctttgaatacgggatatgcacttcctgtacgtagatcgcaattgaacaccatctgcaaattacctcgagaaaccagaatctctgacaggaggctcggtctgacccaatcgaagaaattaggcttatatgcgacatagatccccgcatgattcatcattattaatttaaatagcttcacaggctggttggaaattgcggccaacggtagacatacccaaagtagttagtcgagagtgtgtcaaaaaagcaaacctcactaacaaacggtgctagaccagccggtctcgcaatgcgttgcgcctacataagcacaacaatcccacctgcctggcgtatgagctgcgccgagctgacgactctcagcggcacagctgtaatcattctgaatggcctgtggctggtcgattgtcttggtgtgtatgacgacctccgagactgtggatttgatggtgtacagatgacgctgcatttgttggctgagagtcttaagaggtgggattgcgtgggctagggagaggattggtcatatgaatccttgcatggcgaataaggataaggttatgtgggttgtgttgtatacgagtgtttctagggctttggttttagataaatagggaattagacagcggcatttggtttatggtattgatgaggggaactatgaatgtgaatatgtgctgttagtcaaggatgaggtacaatcgagctgttcattttcttgctcttgggcgtatgctatagtatcacgattcacgacatggctaacgctgatcgcgaatctttagacagcctccgggaaattgtcggaggtgaaatttgtatattcacaggagagggtatccgttataatgtgggttcgataagcttcttcagcttacgaagagagagaggtttgatcaagtactcgtcgacacctgcgatcactgccgcctgttgcatggtagctgaagcgactcctgtgacagccatgatgcgagagggttggagaccgtgatctttttcgtgttgtcggatcttactggttgaaaccagaccatccattataggcattgataagtctagaattagcaaccacccagttagtattttcgggatgagggaggggtgtttagcagagtagtagacgaacccatcaatatcaaatcgtatcttcgacttgaactttcaacaagttccaatgcaatcagtccattagaagctgtgtcgtaactacatccaagttttcgcatgagcgtagccaatatctggttgtaagtcagacacaaggaattaatggaggcaaccgatatacagaaaagaaagggtaaattctgcgtaatcgagtttgcagtgagataacatacccggagattgatgtcattgtcatctacaattagaacatgcatatcgttcggttgatcgttcgatcttatcggagagcctccgataggactactctgacagaccagttcaactggaggctgttgtggaagaccttccggtatttctggtagggtcgacggggtaggttctgacagaagaatttcatgggtttttggtggaacggtaattggaggttcagggccgcgtatttgaggttgtaaattgtgcagatgcactattttttgagctgtttcatagattttctgaggtccgtatctgcatcaaaagttagctcagtaccgcaaaagggggtagcttctggacgtacggctgtgacatcaggatagcattcggagcaagagagtagcttagtgatgatgtcgtgctgcccaagacaatgaagaatttgaagtcatggccggtattcatggtcgagggtgattggtcattcaacctagcgttgaactttgcctcctcgataaccgcgatatcaccctctcccttctcgagtgactctgctagtgcgacatgccatcccagttgtacccccaaaacattggcgagagtactctgaatagaaagctttcgtttcgcatcggagctcagaatgccagtgggctcctccgtcaagtcaggacagccactgaacccaatgaggcatgccttcatagtgtccttgtgtctttgcacctccggagaggaagcatcgtcgaatggcttggtagggagaaggttcctcggacgccgtacggggatgtaaacatcgacctgggtaccaacaccggtttcgctcttcactttgaggtgaccacccagaaaggtcactagcttacgcacgacgctgagtccaagcccgacgccttctgatagagcgtcttcctgggcgaatggagagaacgcggagtttctgagaaagtcctgtgaaattccttggcccgtgtctgtgacacggaggtggacaatgtgaggttctgcttgagtttgagttgcggtttgtgacaatgatacctcgacgaggccggtctgtgtccatttcattgcgttaccgaggaggttcatgactattctcctccaggcaccagcgactgattggataatccaggacctggactgctcgatgtttactaccactgacaattcatcggtaccttgagtaatatgagaggcggattgcgaggacgaggtagcagtagctatttcactcgcaagagacgacacaggcgcgggtgcctttcggctggtatggagtataacagcgacttcttcaaccaaggaaccgagattgaagtcggaaactaagcttgttccagaatcctcagtgttggtcacgctgagactttgcgtggttgccaagttgttgattttacagtaatccagccttgtattcgtcagtaaaaggcctcgcccgatggactgcgagtgaaacctacaggtgatctattgtgtccagcaaggtcagtcccgatgttgagatcatgttaaccatatcacggtgcgcagtctgaagcggaatatcatgtagcaactctgcgctcgcgaggatgccatgtagtggggagcgaagctcgtgactaatagaagttacaaagtcaaatttcgagttctcactggcggtccagtgtatccgggatacttcagagatcatagaatctccaaaagccttaaagtagtgtaggtcttctatgcctaaaggacgatgacttccgtttacccatgctagtgtacctgcgagccatcgcgatttgttccaatcccatagaggatagaaaagcacactcttggctccagggagctgatgagctagacgatgggaaatctgctcaaagttctcaaaattgggatcggaagtctctggatttccacatacagaatcaatggggctggccggattgctcctgctgtctatgttgaatatgtggccatctgggaagtgtgtaatcaacgaatgcagcaactcttcagtcaatgtgaccgggcgtttggactcaaggttgctcttagttggtttgcagcttatagcctgacccaaagagccacaatatttttctggatctttgggcggatttggattaggaagatcccaagggctagtaggcgcggtgggggcatctgtcgcaaactccggcaaggcatcccaatcatcatgccgtccagaaaattcgctaaaatagagttagaaactgtcaatgacccaaagaaagagtgactaacaattgcgggtcatttcggtgggcatcaagaaagaccacggcgtccagatccaaagactctttcagtaggagactggcacgggcaaaaatcgcagctatgcgttcagtgatagacacattggctggcgctaatgattccgggggtccttccacggaagatgatagcggttcgtctcggtccgaggttcgagaaagcgatgatggctgtgtatagtttgacacggaaggcatattttgagaaaagatcgacgcttcttttccattgaggctggtagacgaaccttgatcaagcggtgaatagacactaatatccttttccgtaggcaaagaaacgatcgttccacccacatcgcttcgggtggttattgaccccagatcttcagaattcagtttcttcgcagatgcttcaatctgaccttgagtggaagagccagtagggtcaaatttcgaatgacttttgacgaagtttgtcaatcctttgaccaagttctccgaacgacgatgatattgaacgatccgcgcattttcaaggtggtttgagattgagtcggcaatctcccgaagagcagccacatcctcgtctccaaatttcgttcgaggcttgttgtccactacacaatatgaacctagtacgaacccggaagggctgtacaatggcacctcggcgtagaaccgaaagaacggccagccaaggacatacgggcgatctttgtagaaatcctccttggtgaaatcgcggatgatgttgcgtgtctggttggccgttatattctccgtgtctagtatctgggaagtatcttgtccagtgaaaagtcgaatggcgtggggacacactccccattgcaagtccagtgtattgacacccaggaatataccatcatccgcgcgatgaagatttttgtttcgaagagagatcgacgcggttgcctctgaaatgacatgctgattttctccgtcgatgattgaaacaaaagaccgattgcatccaaagcgatagacacccagttgtgtcaatgcagtcagggtggtatcatttgaaaggcgaggggatgttaagtcctgtgagatgtcatgttgatccgggtctgcgcttgtagagactggctgatcaaaagtacaataatacctatagaggttgaggaaacgttagtagagatcgcaatcgggcggggaatcacaaactttgataaatcccggattctctcttgctcgacatcatttcctggctgacccattgcagatgggccagctgatctatagctggtcacttcgacataagactgaagttaggaagttctcatggcacatatgttgtcggaataagaaaagaaaacgggtttacgaaacctgttttagggaaatccctacgctatgtctgtggtggggcttaggcctctcggtaagagatatttatgggggcttgggctagaatattccattataactgtattgattgaggctatattcattctagggacatctacatacaggtatctaggtatactaggtactcaagtgtattcaaatgtatacgcagaagctgaagtggcgtactggggtgatatattgtaccagtgacattccactagagtacccgtgatatctccaccgtggtgttcgacatatcaccattaagctatttagatgaataagaataacggtgtttttcctcgttttactcttttcatttgtctttttgcatcctctttttataggtatcgcctctccattcataatttttctagatggcaaaaatagccgacccaatctatgaaaccttggagacaaccttcgatgattaatgactccaccactaatagagataatctgatttgaaaaacatcattgaaattcgagatggtagagagtatctaattaatcaaatgcgaccggtatttgatactagttgtagcttaataggtcatattataggtgtaaatttacacaggctggttgaaattgcggccagcggtagacatacatacccgaagtagtttagcgtggagtgtgtagcttttctttttatgtggcgaatcatcttccaaggtttatggcaatgcgtcccatccaatcagcttcgagatacgctgatttgcatagttggctaggttggctagatttcctacaggaactggatatggccaggcatgtgctggtttgggccgtgctgaccttgcatagttcggacatgtggtggctttgtgtaaccgttagaggttgagtttctttttagttcttgggataattggaattgcaattaggatttggatgcgggtttgggtatcgggtatttgattccatatatatatccggcctcttgtacttcataaagtatgtccggaaatatatacccccgcagaggtggaaatacaagacagttatactgagggatttgtctctatgcgagaatatgcatgagatacaacccagactagatcaacttgaagcacgaaaatagactaaaccagacaaatctaactgcttgatgtcagcatgtccccactatgggtggagaaggtcagtatgtatttggaattgtacggctatcacgcacatcagtgttttctttcataggggtaaatcttgccatagttgcttcctataggttgcttaaggagaaactgctgagcgggtaccagcaggttcatagcgtgcgattccaaattcccccagaagcgccgacatatgtacacaaacagggtccccctgaataaagctttcaattcaacatcccttcgaaagtatcaaaaaagaaacaaaaaaggatctcgctaataaacgccacgagccggagaggatatatcgcaagatgctcaaaagatacaagctcctagatgagaagcaaaaacacacacaccacaaacaaaaaggggccaaagagaagaaaacaagaaacggaaattaggtatgtacagtccgaagacagacaagcataataccaatcaggaatcaaaaatcgggccaaatgccggggttcctcgacattcaagctcatagacaattcgcgccgtcagcacagggttactgatcacgcacaccgcttcagcctggaagtccttgatctgctgcaggatgatgggaaccatgtccatacggccacacttattggtgtctaggatgataggggctgaatccattttgtggactagatgcatgatcctatcgccgtaggtcttctgaggagcacgagtttgccaaagcacacgcagtgcgggtcggttgtcatcaccgaggaatgacagacagggtccgatgcccgatccggtagtgacaactatcactctccggaaaacacgcatggcatatgcaaagccatagatcaacactccgcgcttccagaggtgagtaggcgggttctgaattgtttctgcagtccaatcaccagctttggacaccaacgaagagaagcttgggttgccgtggacgcctgcgggtgtggggtctgggaaagtggcaaacccatgccaatcccgaagcgggtgcttggctagttggatgccctttccaaaggtggtaatagcatggtcgaaatgcaagcgggtggcgtgagtcgagagtggctcggcccgcactgcgaccttccgaaggaacagccaaggctggataatggctgctacagtgagcatcaagaaccagaatgctggcagctcgatgatgaatgttccaagtggttggcccgtggactggctagcgtttcgagagaagacgatcagcagggcgacaaacaaggccacgaccagccaccccgaaaaacggtgagtgagttcgaaataatcatgccgtttcattcggaatgcggggtgggacaccacgatgatcgccagcaacaggaccaatatgacataagctaacgcaaccggtgctgctgaaataccaatgtccgaaccatcagctgatggcttccagtactggtgggacatcacgcccacgaatcccacgtaccacacgagggcagcgactccacagccgctatggacaccgccatagtggtagacttttgcggcgatccgacggaggagaagcggcgctgagcgcggcatcgaacatacgatgacgaatatagcattgaccaccagtggctggcgggccaggccacaggcaagcaaattggcggctgtggcattgaccaaggccaggagtttctgttcagtgctcatgatatacacaaacattgcaacgtttgcgcagaacactagcgtgaacagacgccggtatagtgtgaggatggcatatcgggtagatgcaaataacttgggtttgcgctgggtctgtgcctccacatcgatctcctttgcgatatcgaagtgtacggattcggctcccttggaagagcacttttcatcgattttgtattcattgatgagagtcgcctcgctcacagtcggtgtgtgtcgtgcaacgaccacctttggaggcatagtgatgggggttttctctgacataactatgatgggttcccgaggtatcacactggctcatataaaaagttcaaaagatgactggaagttgtgatgaactaatcaagccagggattccttgaagtgaaagagactgaaagaaatagttgacaacccaaccagggcgagtcctccattttgaagtgaatcacttcaaccaagacctttgttttttctcctctctctaccaatatccaccaagatcagcctcacaccccttctgcatggcgactttcacgtccttctttcccaatcgagtttgtctttccattttgggcgtcaccaggcatcaccgcgaacggtaacaccctttcgcatctgttcgggtctattcggccatcaatcgttctctcttttgagtttggctctgaaaatgaggcattcattgcatatgatcccattatttggccattttttccccattcggttgttgttcccctctcggtgtatgacactatcacctcggggtccaggattcacactattgcaagtctttgttgccaatcagcatcaaagaaccatcctactcccttgctttcagcttcacacacacctcgggaaagtgtctgacgcaatacctgaaagactccacgcagcctgtcagaaccttgtccgatcctccatcaagagggggtggatctccctttcggggatgaaccggaaagggagatcaaataatgcgctcattgaggtgcgatgcaacctaattcccagtcgatatctccacaataaccaaaccgaggaccagtcaaggcgagatgcgcccaaacaccgtcacggaccaagtgcaaccggaccagggtcgacttcactagtcctgatgggatgcaagcgctggacatgatggccagtgcacctgatcatacggtcaagaaagccttcaataaaagagacgatctgcagcatagggatagcgttgactagccacaattcctttgtaccgcggcatcaacaaggcgaatgtggatctatagaggtgtggctgaatcgtgccatgagttaatgcaataacccgtcggatgataaggcagttcatgtttttttgtttttttgttttttttgctttttattttttttggcgatttttgttttcaacgctacgtctgcgcggtcgatcatgatgcagctgagggtgttcggctaggtgccatgaccacccctccgttatctgactcgcacggcggagttgtatgctgatccttacccaacgccgaggtactggcagcgatgcacgggtgcagtacataacctagatgggtgtggagcacggtttcgttagccgatatttcgctagtcgatctggatctggaatccgggaaagaaaccgtcctcagattcaaagtccatgaccccacagccaaggcaacaatataccgacggtctccactgaatatcagctgcaggtcttgggcatccattgcaatattgggcccataacaacgggtgggagtggaaggagagtgcatcccttcacgggacgtcagcgatgaatgacaggagcggggaacggaccacgcctctgatgtggcagcaggggttagattagcctgaagaatattcaaggggaatcgaaccggcggaacagcgggatgtagcacacccctgcctaagctcgtgggcgacctgaagaaacagtttagatggccctaagaagggaatgtgagttcatcggattagagtttggagcatatctcacgatccggtcgatctctatgaacacatttccaaactatatctcacgcaaggcaagggaaaccgtcagtcaacatggggacacggacgaaagggtgatctgatggtgtggctcagctcccaagggctagcgaattagtgacaagcaaatttaattattttcgatctatttattggattttgaacccgccacaccggatggcgctaagcacgcctggtggagacacgatatagtacaccgtaccctatgtactccatagtgttgtgatccgattttgcgatgacatagtgtgattggctttacacttttgattccttgctctggaggttcagctttttcagctccttgtttttgaggtctgatttacgtctatctcgtatagtaaagagttcaccttacagttgacgcagtggagactaaacctcattacataagccatgtattccaaatcctggaacaaggtggaacaggccggggggcagaggagatgtcaaggtaaattcaaatcaaagagaaagcaaaatggaaaatatacatttacctatataacccccagggatttccatctggattcattatatactacacctcttatattacttctaatcctaccaaaatgggttacacatctatggctttgaacaatatgccctcccaggtctactcggacttgctgagtttcactttcgatggtccaaagccatacaaccagaaccaaccgctgtttattgatgccgaggatccgtcccggtcatttacagcggcccaattccgacaactagtccggaccttgatcgctgggttgaaagcccacaatgtccagccaggggactgtgtattagtacacctgggaaacagcgtaagtgaaagaagcacaaagaaaagaacatccttgaagtcggaagttcaatattggactgaagattctcggaaaataaaagaagcaatgctgactcgggcctgtcatatgcagatactgtatcccgcactcttcttcggtatcattggcgccggtggtgtctatatgggatcaaacccccggagccacccccaagaactcgatcatatcctcagtctcgctgagcccaaactgatcctcacaacccgcgatgccctcccctccatcctcgacgtctccgcggcccgtggcatccatccagcgcaggtctgcctcgtcgatgaccgagccatcgaccactgcgcacaactattcctgtggtccgaactaggatattcaccagcaggacagttctgcgccatgagtggcgacgcgcgtcacaacagcttcgcgaatttactctgcttcggcgaaagcgactggttgaaattcgccgaccctatcgtcgcacaagccacgcctgcagccatgtacccgaccagcgggacaggcggactgcccaaagcagccatcttgtcccactatgcgcttgtctcacagcaccgctccatttactatgaagtgccacacccagttagccggctgatctcgctgcccatgttccatttgtttggcgcactctggacacatatcttccctgtccgctacggacaccccctatttgtcctgccacgcttcgagatcaatgaattcctggctgctgtccacaagtaccagatctctgagacttaccttgtcccggctatcattcactctatcaaccagtcgcccgtacccatcggcgaccaactgtcgtcgctgcgctatgttgtgttgctggcgctcctattgacggccattccatgctacagttccgccgccatatcaaccctatgggatatgcttgccagatctggggaatgaccgaggtcggtgtgatattccagacccgctggggccagcagggtgaccctggaagtatcggcactcgtattgccggatatgaagcccgcttgttggaccaggatggcaaaatcgtgcaaggcgattgctgctcgggtgaattgtacgtgcgcggaccaggcctgctcactggatacaaaggtcgcacagacgcactggagccacatggatggttccgaacgggagatgtagcgtacgtcaagcagggccaatattacattgttggccggacgaaggagcttatcaaagtacgagggtaagtccatcgtcgattcccagttccctcatcaacttcacatactaatcattttacagatggcaagtagcccctgctgaagtcgaaagcatcctcctgcaacacccaggaattcttgatgccgctgtgataggcgtgaacaaggatggtgtgggcgaggtaccccgcgcctttatcgtgcggtctcgtgacccatctgtgcgccgcataaccgccgaacaagtttacaactttgcacgccggcaactggctaaatacaaagccctcgatggaggtgttgtattcgtggaagagatcccccgcactgcaagtggaaagatccagcgcttcaggctgtcccagatgaacacctaccgtgagatggtggcgtccctgctatcccgattcgatggtgaccgctccgctgcagtcactgcggctcgacgtggactacccgctccagagatgtcacctgttagtctcattcctgaggggcgggttgcggtttgaattaataaagcggggcatagcattttgcactatctatggcgcatataagttgttcccactcattcagcggtgaagcaatgcggtgaatgagacagggagggtgtttgggttagaacctggcgttgtatatttggtttgtgtatttagtttgtgtttgttttcgggtgcttattacatgttgatttttacgatccagactcaacctccttatgatgtttttaaatgactttaattattcatcttagcattacccagatatcggattctctaaatcgtactacctaactatttgtatttgaaccttacaaatcacacaaaacccgagttctcagacataaatttatgtctagtggtgaaaaaaacctagatgatccccaaagtccgagccacagcatgtatgttgtagtgagtcactactccgtacctcccacaccgcacttccaagccccacttccctgtcccaggccaaggccaagctctcggttcctgatatcggcttgcatccgaaaaccgtacacagaaaaaatgtgatgtataaacaacaactacctaatatattttatggcccgagacagtcgcgttcgcattatgcacatgcaaggtccaacaaagtacgtggggctggatcgaacggaatccgaatccgagatcgatctcgaaaatcccacgatgaagtgcatccgcaccaatactatgcagggcccaggcgtccacgggtggaaccttggaaccccggttccaaggttccctgtaaggaggttccttggtactaaagcggggatcgacggagctaaataggttaattattgatgctcgattaggttgcataaactagttatataccctgctctgcctgaaagcatagatatgacttatttgatctcacgtttataataaagacccagaaagccgcataatatggttactgtaactggtaattctctatatagtcatactgccactcctgcgggagtctctagtcctgcgggaactaacggcgtgctagaggggcatcatcaaatcaacaaatcaatacaattacttttcaaggagcgattaacagcgagctagggaatcacgcacaaagtaccgcttgaaaacaaaacgagggagtaacaatagatcagaggagccaatgtgtgatttgttcccgactactccttactccaccttggagaagctctagaccacttggtccactcagactagctggtccccccagactcctcggtctccctagaccactcggtgtccaaagatgatttccataagcagtagttccccagacagaaaagggctccgtatggaagagggctccataaggaagaagactacatatggaagaccctccgtgtggaagaaccctccatacgcaagagatctccaggtgacatactagtcaagttgcgacacccggatagggccgcgacaggacactaaaaggtgtcagcaaacgacggcttggattggtcgcttgcgagaatggagtggcaacataatcgggggaaacattggattcgatacaatacaactgaacagggataatcgagggtgtaaccaaagtgggaatagggcgtttcaagatagcgttcgcgacaaaattaatgggattcgacctctaggaaccctagtgtccggacaaggttgagcaacatatcatggcgcactggtggccaccacgcagtcttttagcatttccaagaacttttgatttatcagttcaagaagctatctcgaactttaaagacgtgaggagttcggaggtaatcatagataataatacataagtaaaagcaagcgtggtaccagaatgatatggcatgactacccactagtcgtgtgtccatgcatcatcgtagggttcccaaacagcgacagcagctcgacataaggcacatgttctgactggagacattccatagcagtttcgaagtccaacatggtcacggctcctgtctccctttgatataaaacgttgtgttttccagcatcgggcacgtagattgacagagaccgaagaatgcggatggccttttcacattcctcacggacgtgggttcgctcgcggttgctaagttcgtcccagacatgggcgaggatctgtccatccttgtaggggaggacaagcgcccttccgttagggaataaactcgagcacattatgttcccagcaagtatcatgttcgcgaagacatcgtaaccactaggtcgtgagtctgacagacgctcatagacagcacattccgcattagacctagacgaatacacatggtgagataaggaccaggataatagcaatcggaaatatacttacgcccgatcttgtctgggactccagcacttcacgatatggcgtgttccttggtgttcaatctcgaagagagccttgtctgtgtggctagggggtgaaattctccgggacacgtttaagatcgaaatcgctcttccctggtggccgagaatgattgtattcggggtaacgttcccgttcagtccggtcactagactgccctcaatggcatggtctctgagcccagaagggcggagagaagcctgaagatcatcttgaccccgaagctgacattcatgttagcggaaatataccaacaccctttgaatataacttactcgctctgccctgaagtctgaaccctcgatgtagtcatggccctgttcagcaaggatacagaaccccgcaaaacactgccgaacagacaaattcgtatcccggtctcgaatcggtggggagacacagaaggcgaagtcagctgtccgcttgacgaatactgtcccccggtatgtcgatagaaagccgtagcgcaacccgaatttcctcatctgcgccacgagttgacctataaatatgtgagtgatagtagtatggcgctaggatgagttgcacataccaagatggggtaaaatttgcggaagaatcacggggtcagacggagaaaatcgatcgagcgcgacagtccagtaggtcttgagttcgccgactatcttgacctgcgcttgggagtcgttgctgagagtcacacctatggatacatctgggataacgtccgatgttggagtttcaaggcttgaatatctcccatcaccattgccggctgtgaggcgcgcacaagaatcttggcaactggctcgcagacattgttgacgaaccgaccagataagccgatttcatttccgaccaggtatacctcgccgctaggagagtcgatgtgggcaatctggaagttaaggtccagcgatgcgagggctgatcgtatctcctggtcgaatgtagtccactggtggatgaacctttgatgtagccactcggtggagactgacgggtggctcgtgccacgggcttgtcgtaagaggggcaaaggacttgcaagaacttgaccggccgtctgcattttgatcgatgatatatggccaggttttaatgaagattcgagcgggatgaggaaaagaaagagaagagtcgaggggaggaaggagcaagatcatacaattaagcttcccggcactaaaccttgtctggtcgaaatttcgatttataaacttggattgttttcgtatagatattgttgtggtggccacgtgccgatcacatgccgttgcctggtttgccaggcttcacatagctatttagctagatctcgatcgtttgtaggaatctaaccttctacatatctctctcaccgctccaagagctatggttcatgctggatgtcttcatggatgctttgtcattatacaattaagatagatcgaagaaacctatcttaagatttccatttccgattctcatcagtaatcagacccctcctcaacaaccattatttataatatatccatactcttaatccccagcctcaaataataccataccccatccaccacacaccccaaaccaaaggtgccagcgccccaagaacagctgccccaaccgacaactccagaatgcaccaaatccaaatagtcccaacagcaggcgccttcttcataaccgcataatacggctctccattcgtgatagcgataagatgcgcgcccagcagcagagcaagaggaagaaagaccaaagtccgcggagcaggtgggaaaaccagctttcgtaagaatgaaaatgtgaatttatcacttgtcaatgggaataaagaaataggagcaggctctgcctttgcatcctttgagctgcgctttgtgaaggagacgatatgaccgtgtgcgaggtggacgaataaagtgaggagagggaaggcggttgtcacggattctttcaagagacttggcaggtcgattctttcggcgtattggtgggctgcgaggtagcctagggtgaggtggagggttgtgagaggcatggaaagaaggattgtgtcgaggaatggcggaagaggtttgtcgggttccgattcggagtcggatttcttgacagtattatcatttgtaccctgttgactattcttggtcttcttttgggaggcattggatgagagatggctgctgatgtcgccgtcggtgtcgaccaattgcccagacgcgtcgactgtcacgaatcgggttccccctgactgcgacggtatgccttgtccttccaccgaagctggaattgatcctcccctttgatgaagtgcgccttgtcgctctgcgatgatgtcatataatgtgcgctcgactgttggtttgtttttggtcggatcattgcgatggggatgggccatcgctatttcgggttcgtcgtttttagaagatccagccgctgcacgacgctgctttcgattccttggtgtttccatcttgctcaggctggtatggagggacaatgagtggtggggggaaaagagttaacaaacactgacgtggagaaattgaggttgaggactcggcgataagccccatcaatcggggttaaggtgagctaagatgatcgccagttggctcataggtctaggttatatttctcaggcttgggatagatatgaaaacaaacttttctaaattcatcattgttgctaattaattctctgcaccctttgacacactcgttcaatacatggactggccactcattcaaccagcctggtatagagctggaccggcaaccacatgcgggttaatcaagctcagattgaatggactcacgtacggattgctgtctgtaatggcaataaagatggtaccattgaaagctgggtcaccttggtaggtttccaggctcggctgggtagtatatcctcgaatgccatcagtggtactgctggtcctattggagctgctggcactattggtgctgttggtgctgttggtaccattgacaatttccagaggggtataagtaatgttcagctgcgacacccaaagaacatactttgcgctaccagctgtcgtctgggttgtggtgacgtagctgttgttgggaccgatttgcttcccaggaagatcccactccaataacaccgtccgacccggggccgagagaggcactgggcgaaccttactaacagcagcgccgcagccattagctgagccagacgagttgaatcttccgaagccttttgctgacttgggaatgctgacgcctggtccgacagtattgttgattccagtggtctgattgaacataaaccctgcagtctgattgaacccggaagtcgtgttgagccttgagatctgatcgccactcgaagtaaaattgtacccagtagcgttatgcccagtcgttcggttattacccgagggcaagttgcgataagcccctggactccacggatcgggctgattaaccaccatcagcgttgggaaattttgccaaatcacccgggtctgattttcaggacaagagctgatgaaaggtgccagcagtgtccaagcccaagactgcggtatgccaacttcaaaccattcaaccatcgggaagagaccctcgaactggcggaagatcaattgctgccgtgcttccgtagtgatggactgagtcaagagagtggccgcctcgcgcgagtcaagatgagccaagaacccatatacgccagcttccccccagcgagtgagtttctgacagaagtcgataaactccttgacgttggtgtacgggtagatatagttgcactgcttcggggcatgagctccgaggatattgctgagcatagtggcatggcctatctcttgctgcgccatgaatgcgatcacctcgcggtccgcagcggtcaaaccggcggctcggaaggctgcctcgtcgaaacgcctgagtccctcttggaagagatcgagctcaatccattcctggtatagagccagagcctggttattgcaggttagctcctggaccagaacattgcttcgctcaatttcgtgcggatacataccaaagactcgtagtcgaaatcgcttttcgcgttgtagacgggcgtgcttccgttggtcccgacaccaccagccgggacatatggagcaggctcggcatggtaaagatttccatcactgggatatgatgtcgccccgggtgcaaccccaccgcgagagatgcttgttccgattgaagaagccgtcagtgcagatgtggtcgtcggtgttccagtaaacggtgtatacagcatggagctattgtaacttagaagtggcggcgctgaagccgatgcatttgcagtcggcaatggcgagtcagcggttgtagttccgccattttggtgtttctttggagaagcagccgtgaaaggcagtgagctcaataggctcaacagaatgatactgttccagatcatctctggtgaaggtcaaagtcgcttgaatccaagacagaaaaagaagctcctttatccctggtattaaagcattgggtcagttgtaattgttggaaagccggataggtacggaccttgcgtagagtacatatagtgctattttagccaatatcatcgccagccaaggcaatccaaagtcagggtcgttagaaaatcacacaatggtgaagacaccatcttcagagctaaatgtgggtagctttgaacggggatgaattccgaatggtgtttatcctcgtcagagcggacgttcttcgtatacttggctagtttagtagttgcaagatactgcaatccccacttagagaacaatccccgggatgctcggcaacagacgacatcggcgcactgccaacattccatggacctgaacagactaacgtacaattcgagataactgtgggggtggaaatcgaatccgaccggacaatgccggatagcgtttgagggaacaaggggaaaaggctatacggttcttagttaaaccatcagcaaaataaatatgtaacaatgagagtggtagaaatagaattgctctgtcgctggaatccatggagaggcagtctttcctatatagatagcccggaagtcgcagtacacaatgccagagcagtttatcaactcaactctataagtaccagatctcactgtgtccgccagccaccctctcccgaaaagtaaccataagtatcgcaatggggcacattggcagtaattctcacaccattagaccaaacaatctccatagtagagcccataatagtcgcggtaaaaggttcacgactctgcagggactggcggatgctttcgagctccttccaaggaatattgacgactgcaggggcccgttgaaatggaaccgccggttggccgcgagcattcttctcgaatacccatggctcaccgttgatcatgaatacaccagccagagaatcgccgttctggctggttagggatccgatccattgagtcatgactggatagtcagcgggcaactctgcaattttccaggaaaggtacttactggctttggggaatctcgggagctgtgagaagggagaaactaggaagggggttaggaagggggctagggaggatttgcttcttttgtggcacatttacatatctgtccagaagatgcgacgatgaggatttgccgtgtatcccggccggacatgcagagtttaccgctatatccatggtgtcatatctaaccataccatgaatggatgttccaattcaccgctcgttcttgttatgctgtagtgcttatgcggcttcttgaatctttgccgtatatgataggagcattgccgaaaagtggcttaagtttaaaagtgaggagtctttagccgagtataagagcaaatcatatcgagctatgattaaactctagaagtacgaagcacccgaataggaagtatacagacatatgacctgtcacaggctctagggcgaaagtggatcggcaagcgttcccgcacctaatttcctttctgtggggccttgcaatatatagctgggtgtgttctttgcttagcactctgtaatagccctgataatggtctggtattatcggtctgtagggttacggatattatcatcgggttactgagttaccaaagcgaccctaatcaaatacatcatgcaaatagaaccatattgggcagatgctgcagctactattacatgcaggctagacagctgcatggatcttcctagtcattaagaagctttgaataatttgaccaggctgctaaatgtttgtgtcaagtatgatggagttatgcagcaagtgggccaacatagactagaaatagtggagcgtatagcttgggttcttgtatattgttcccattcggcaatcagcgaggttatccgtgtagatcagaggcgaccttatatcaaattaactaaccgtgttcctgcaccagaaagactttgaaggtgacctataagctgtgagcagtggaccacgagtatcgcatatttgagctagcacctggaatgatcctgactatctgcgtcagaaccgttatccataaagcatcgaaatatcacaattctttggtgtgcatgggaaatctagatgtggatatcctgcatgctcaaaagagaaactatggagctgccctaaacttatgcaatattactaactccaatattcacaagcgttcgataaactcattccaacacacacatttgtaatatgtcgagatgaatggaaagtcggcgttgttgcatgaaatcggcgttcctccgtgatataatttattctcggcagcgtcgccgatccaaagcggggaaagagaaaccccagaatgccgatatcgcggggccttgatttctatagaagacatcctctcttctcttcatccaaaccatcaggttgcccaactaaccaccatggcccatcttcaagcatcgaatctattctcggtcaaggaccgggtggtcgtgatcaccggcggcggaagtggtaagaacctaattatatcacagatacaaacgtgtacatgtaagctaacagaaacacaggcctcggacgtatcatgactaaagccctggacgccaatgaagtctccaagatcttcatcctaggccgacgcgaagacgcgctacaagaaaccgtctcgcaaagcataaacggcaccatcatcccaatccaatgcgacatcacctcgaaagaatcactcgaggcagcctacaacgccatcgccgcccaaacaacacacgtcgacctcctaattgccaacagcggcataatgggtcccctcatgaagcccccgcaacccgcagcagacgggaccctcccgccgctgtcgcaagtacgcgatgaactcttcaatatccccatggaggagtttaacaaagtgatgaatgtaaatgttaccgggtcgtactacacggtgctggcgttcttgcctctgctggaggcggccaataagcgccgtcctgcgccgcagaaggatgttcttgctgccccgactgcgcaggttattatcactagctccattgctgggtttattcgcaaggtgccgttcagcttcgcgtataactcttccaaggccgctacgacccatctggtcaagatgctttcgacttcgtttgcttattacggtattcgggttaatggcatctcaccaggtctgtactactcggatatggccaatcatatcttccaggctgcgggtattgagggtcgcgcgatttctgacggctcatttccgagggacatgattcctgccactcgcggtggtagtgaggaggactttgcgggtttgattgtttggctggctagtaactcgggtggttatatcaatggtaatatcttagttactgatggtggtcggatttctgtttgccctgctgtgtactaagtggggttttgttcaggccgagtgcagtttgggtatacagctgtactgagcttcaatgaaaatagagatatgtagagttcttggtttccagatatgaatgtttaaacgctcatgagtaaaggcaaatgaaaacacgaaacgaaaatgaccttcgcaggccaatctcaaggtcatggtttgactattcagtaagtcgccgtcaatcgctggaccagataatcgcctgaagtaatcggcgagtattttttggccacttggatttcctcgccaaaagtccccggcagcgcttcaataagtttatcgttgttaggctggcagaaatacgctatgctgtaccgagcaggatagtccgaagcatcatccccagagccctcggggacgggtggctgaattactcggtgacgggtactcttgatagtgtcattggaccatcgggcaagcagatccccagcattgacaacaatagcatcagcgatgggagttgcatccacaaaggttcccttggggctgcgcacttgcagaccgccgtgtcgatcctggaaaagcagagtgattgaaccatagtcgctgtgctcgccggcacggacttggttagggttatttttgaagacttctttgctgacagaaggatagtgaagcagacggaggttattgtcaccggcattgacagagtcgtcgaagaagtgctccggcaaattcattcccaatgcaatggcctgcatgatatgtttatgtagggtctttcccatttcaaagaatgactgcatggtttttttgaaatcttttccttcgtcgtcgagatgatcgggccagcgattgggcaggccttcgactccctcacgaccaagttccatagtctccttgatgtccggcgcggacgcacgaagagtgtcgacgccagttgtctcgtcgacggtggttaacttctcccgcccgatagcgacgtaaccacggttcgactgcggggtcgtccagcccagggaatccttttcactctgggggcgggcgaagaaacgggcagatgacgcaaacaccccggacaccacggatggcggaatgccatgtgccttcagataaaggaagccggatgttttgaaggcttcggttatggagagagcgacggcatgtttatcggatggggtccccgtgaagaatgggccgaagtcgatcagctagagcagatctcattagtcgtggcttggaataaccagagacagagcatactggtatcttcaaatcatccttatctaccgcggcagacgcttgattgtcgggggtgttggaggtcattgcgtacacggcttcggggaatttgtatgaactctgttgctgtaagaaggcaccgagacagtgacagaagcctgtaaagcgagtgcacgaatggaaagaaaagatctcaagaagaggggaaagtcggagaaggggaatatcataggtcggcggcatacatcgacagataagcgtggatggctgggcagataagccagaagataagcgtttatattcgatttgttggagatttgactgtttgtatcgtcgaaggaatgttatcaggccatttggtttgattgctgtacatttgatcgtgaactgacagcgcagatcaagcccacatcccccactcctccccagtgacccctaccgacatagatcttcgcatctcaaagctgaaaagagggcgcatcaaagaactaaatacgctgctgacatacagtgatgaatggcgacaagactcccccgaggaacaaacggtgcgattccacatcttttaccacaacagtcgaactaggaagccatgtggcatctctgtcctccacgagcttcgtgactatacaatcctttccgctatgagttctcaactgagcggctattccattgaccgcaagaacggtaacaggagcaacaaacccgtatgggtcctctgtagacttcataaacgcaatggaatcaggaaatccggcagccaggaggttcccatctgcatcgagggacagattatcgatcgggtatcccgtataaatcttgtcaacttgaatcagctgctcgccaaccaatttgtgaacagtgacggctccagtcactgaatgagccacatagtagagcccgttctcctggacgatgccattggcaaaagaaaagcctttgtcggcagcgacatggcactctccggtgtcagatcgacaataggtgaggcttccttcgccaatcaacattcctaacgccgcgaaagtgctgaccttggcgtcgtggtcgttggtaattacgatccccaagccatccttgtcaacggccaagttgttaggcgagatgatcgcgtcactggctatagtcttgacatactcaagtgtctctgaggcatcgttcaaatcgaacatgtcaattgtggaattcgctccaacggcccaagcatcaaggaacttccctgttgtaggttcgattgggggtctatgattgatcaaccagaatcgaagtctgccgtcaacactgcgcacgtcaaatccatgtagatccagattgccgaggtagccactgattttcagctgatggaggccatacagcccgtccgggccgggttggtcaatattcaacactgcgatatgatccgtgcgagatctcgcggagatgttgtattttctgccacccggactccatccctgcctggactgtatatttccgcatgctgcgtacagtttcctcccttgatcatctagccacatatcctcacatccttctaagagagggtgctggaggcgagtgcaggtccatgggaattcttcaattggttggatctctcggccgatgccgattgtgagaaagataatgttgtgcaaataggctttgtaaaaaattcccagggcgagcacaatcacggcccatctcacagctcgaaggctgataattcgagccattgtgaaggttgggataaatgatgggccgatgccttgatgcctgatttggacctggttcctggccgcttcctaactaactatagttaactagtgaccgctcttcatttgttactctgccggtcttcattcaggcatccaggccaaacacaggcaccaaggcatcattatttactccaaatgaaggtttgaccccgccaaggttccaaggttaggcggggctagtcaaccttactaatccttggtgccgatgtataactacggaggattaaccctttttattggttccaagacgaataaaatgagcatgaggtagttatgcgttgaacatgctcatgctttatgtcttggatctgcttgtcctccgtactctgcatatcaccaaggcctcggccctccacctcgaaggttccaaatgtccacttgcacattaataagctgattgggaatcactccacggacctcggtagtagctaaaaccccaaggcttccttcatcacctccatttccaatatacactatctctccctttttcattcaaatacctctctcgccaaaatgacacacactgtccttgttatgtacccgaacgaagtcgacgtccactttgacgagacctactacatgaaaacccacgtgccactcatcgaaaacatctggaagagccacggcctgatcagctggcatgtcaccaagttcaccaccgcgcttgatggttcgcgacctcagtatctggtgatcaccactctccagtgggagagcgaggagtccgtgaaagctgctctgcagaaccctgccagtgcgggggtgtttgccgatgtgcccaacttcaccaacgtgaagcctatcactctggctggttccgagctctagtgttcatgagtgtatgtcaaattgcatgttgatgattgcttcagcgctgaaattgatagttgccaatgaatgaaatgggaatggattataaccgagtcttgaaggccttggcatttttaatgataagctgtatatctcctctatcaagcgatagcacattcaaattgcattcctcttctgtacgtaacatcaaaagaccacagaccagacttatcggagataaagggattgtaacatctccgcgcttcagaggggcgtccccgctcaacagctcttatctattcctcccctcacttggatatccgaacttggatacccctgcctctctcttcttcttctcttttctcgattctatctgtattcccaaatatgtcgcgccctctagtagtcgatgtccacacccatgtgtaccctccatcgtacatggcgatgctacgcgctcgcaagacagtcccctacatccacgacccagcgagcggagaaccgcgcctgataattctgtcatcagacgatgacccatccattccaatcgacgagcgcggccgtcccgtcgacacatcctactccgacatcaatgtcaagctaaccttcatgcaacaacatggcattgactgcagcgtgatctctctcgcaaatccctggctagacttcctcgatcccgccgaagcccaacaatgggccgagcgcatcaacaacgatctagaggaaacctgtgcccagaacaataagtccactgacccggacaacaccctccctctgcaggggaggtcaactttgtttgcatttgcgactttgccgctgagcgcacccagtgcggatatcatcgttaacgaaatcaagagacttaagaccctgcctcacatacgcggcgtgattatggggacctccgggctgggaaatggtctcgatgatgaagcgctgggtccggtttgggctgctctggaggaaacgcagttccttctcttcttgcatcctcattacggtctccctgatgaggcctttggtggtcccgaggtaacaaagcgctacggccatgtcctccccctggcgctgggattcccgcttgagaccaccattgcggttacccgcatgctgctgtcccgtgtctttgacaaattcccgcggctgcaaatcctgctggcgcattcgggtggtacgttgccgtttttggcggggcgcatcgagagctgtattatgcatgaacggaagtttgtggagaatggtggcgatgtccctggtccgcaaaggagtatttgggaggtcttgaagacaaatatcttccttgatgctgtcgtctatggggctgctgggctcaaggctgctgttgctgccgggggaggtactgatcgtcttatgtttggtatgttctcatatatatttttggtaggtggactcaagctaatataacataggtaccgatcatccgttcttcccgcctctaaatgagggcgagaaggaatggatcagtgtgacaacaaattataaagctattgatgcgactttcgagggggaaaaagaggctgtggctgctgttttgggtggcaatgcggttcgtgttttgaaacttgaataagcacatatactatctagcataaatatcgctatacggtctgtagatataataccaatagcaatgaggtataaaggagcacagtgaacaaacataagacaaatgtagtcatgatctcaggctttaggttggagcaaccacggtcctcaacacatcccaaccaacaagccgccacagctcctgtgtaagccaatccgaaaactctctctgatccatctgtttattctcaagtacctgaggaggcggagtatgcggacgccgcaggccctcccgaaacagatgatcatcaggtccgaatacagcccggaggagagacttttgcagacgatctttggcttttgtgacaaactgccgagcagccgatgcctcgaggggtgattgacgggactcggcattaagcattctatccagaagccgaatcagatacttggcttccagttgtgcctcgttcggcccaagacactcgtcagtcattgcctccagtccgtctgggaacgtcatcccggggcagatgcccattggcaatcgcaggtcatggaacacgtgaagagctagcattttgcccattcgatcaatgacaaggaagagaaacccttccattacttcctggtcttcggtgcgcgtgagattgagggagagggccatcgtgcagagcaggtctgcaaggcgaaaggttatttcattcttggtagctaagctgttcgcttttggacgtttgctttgttcttcgggttgcgtggtaggctttgggtctccactcgattttgtgtttttggtgactggcttttgcttggatattgaagtacaatgcaaagtgagtgctctcatggttgattcgaacagacctactaagtagtaaatgacttggccttggtgctgcattctattcttggctccgccaatcttgtgcaatgctttgtgtgtgagatggaaagcaactgtcacaccattcataacatcatgtgtatccggcatgttggcttgccctgtctgagaaggtttctgctctgtcatactgctctccctctggatagtttggatcagtttttgctctgcggatttgcagaggatgactgccttcacggccagagaattagcctcagagctgctagttgtccttctctgcagggctttttgaacggtatgcagatgcctattgagacataagactgtaatgacattagttatcatcatagtcggtcgatgaaaggggaatcaaataccatcttcttctcctgaatcatcatcatccatcaatggtatgcttttctgcatattttttggtagctttatgcgtttcttggccatgtttgaactattcgtattcttgccaacagcagacgccttgcgtttgtttgccggcaagctctcgttgtcatttgcagtgccattgacacgcagtttgacaagaaggccttcaatacgctggttaagctcatggacttgatcttgtagcttgctctgtcctgcctcggaccgttcgtatgcctgttgccagaaagagacgctatcgaagaacttgtctgttgcaacaatttggcccaagtccttggtctttttaatgaagtgccgaatctgcaaaatgtattctaaaatgtatagtcaataatcgaatggtctgagtctgtaaaggttggatcttcgcctaacctttcacgctttgccctggtggttttcccttgacaacagccaatgccagggctaattgaagctgagttggaggtgtaacactaagtttagatgttgatatggttgtcatcttgtcaattggctcgaatagatcatggctcgtggtaaaagagctaccacctacaggttgagagtagaaactcaagatgcacacgtgcccaggcattatatatctctacctcgatcgtacaattttagtcgtaataaaaaccagactcaatttttgaaaaatttaaggccaaagcctgacgaaattccgaattctgaatgctttgtttcaattcagcagcttaaataacagatttgctgattatttcccaattaggatctcatagtatactggttggcggcctgaggcgaaacgcatccaccgcccaagctctgaactcgaacctacaagtttcaatctcaacaacaacctcagttcaagagctctaatctagggttaatttcctctcgggactatcactgtgctctttataaccttacgccctgatagagcaaccacatagccgaaaaccgccacatcaaactctccacttcatctccgcaaacttccaaggcgacaccagtcgcataaaccaccaagatgccaaatgacgatctcaaggcgcacgccgcctcgaaccaagatttctacgccctgctagacatccaaccagcagccactgaaaccgaaatccgccgcgcatatcgccgcaccgcactaaagtaccacccggacaaaatcaaaaaccccaccgcagcagacatcgacaaattccattttctccagattgcctacgatgtcctctccgacacatcagtgcggcagctctacgacaatgcgcgggaagcgcgggtgcgtaaacagcgcgagcgggacatgatgggagcggcgaaacgaaagatgcgcgaagacctagaagcgcgggagagggcaggcgccgccgaaataggcagcgccggtgtcaagcaaggtgtcaagagatcatgggggacggacggggacgaggatgcggaagagaagctgcagcgggagattgacaggattgcggaggatgggcggcggaggcgacgcgaggctgaggagaaggctaagaaggagcttgaggatgaacggaagaagattcaacagcaggaagaggaggctcgcaaggcggcggatcggagtagccagcgcgtggatcgctcgaaggagggtggtggcgcgcaagtccccgagctcgagcgtgcggtgaaagtgcgctgggtgcgggagggtcgtgggttggagcttgatattgaacagcttgcggtgctgttcaagccgttcggaacgatcgagaatacccttacgcttaaagataaacgccaacggattggagacaacaaggagaagaagactgttgcaacgggcgtggtggttttcacgtctattgtgagcgcccataccgccgttctcgatagcgagaaaaagcttcgtcaacatgctggtcaagatggcgaatggggccttatcgagtctgtcttctgggcctccggcaaccaacctgatctaggtcctggtatatcacccaagcccgaccaggctgtgcctgcacctccaccaccagggccctctttcgacacttccagcaagcctactaaatcatcattcaacttccagggcttgaaaacagctcccccacctgacaaagcgccctcgtttggttcattcgcttctgcagctgctgcggcagctgccccgagtgcaacgtcattcaacccatccactcaggctccagccgcgccaagtctgcaggaggtgatgatgatgcggctgaagagtgcacagcgtgagaaggagcgcaaagccctcgaagaagagatgctacgagaagacgaggccgcagacgcagcggcagcagcggcagcgaagggcacctagctctcccatggaggctagcttcatttctgcatatttgaaaaggttgatcctaattctaccattgtatttagattcaaaagataccccagagcacgttgtatttgcaacgttgagttgaatagagatacaaaagctatttacatgtgacattttgtgctgtgttatattatacatgtgtagtgagtatacacttagaaacctcagtctcggtgcgattcggcttcctcttcctcttcctctaattgctcctcttctgcttcacgatcacggggagcgggtttctcctctttgccacccgagatgaactctctaagccaaggcggaacgaaagctcgtactccgacctcattaggctgttcgacttccggagcccaggatagcttgaagtggtgttcatgaggacgagcaggagcctcacccatgagcgcaacatcggtcataacttcaagacggcacagcgcaagtccaatattgccaacgccatgaaggaacgttcccgcactgcggcctcggcgggtagtggcaccagccttaataatatctgcttcaccagaaggtaaagccaattggaaagatggatcatatgtgagagtatccggggcactttgcccatcctgacccaaatcataaagctgaactggcaaaagacgcttccgcgtaacgccacggtggtgggtgcgaatcgtcaattcctggccgacataacagcccttgcggaaatcaataccgccagccatatccatattgcactgcaaaggcaaagccgatccactaataacctccgcctggccctccgcaacgccgtgtagaaagcgacggacggtgtatgagtccagcgacacctcggacccgacgacctgagcctcatccgggaagtgagtgcgcagactgtccgagccaggcgtaataatgcgggatccgaagcccggagcacgcgtgtcaatgcaaccggcaatttcggaggtaggtgagaatggtgacggcgattctgactctagactgtatgaagcccaccgttgcggctcggcgtggttcttccaggaggaccatattgtgcgctcgccttcctctagagcgcggagcttgagcttcgcgcgcagcttgtgtttcttgaggtgcttcagcaggacggggacctggtttttgtctacctccactagccagcctgactcggcaccctgggcctctgcgccggggagcgggtaaatgaaggcatcgttcagaactcggccttgcgaattgaggaatgcggtgtatgcgcctgtgcgtcgaatatttcgtttcggatcgttggggactagcatattctgggtcatcagaccctggaggaaggttgtgctgtcgatgccggtgatggagatcagtccgcggtttgtgagtcggctgtaccctgctgtcggcgggaggggcgcattttgactctgttcggtacgctgtgctgtggtagagaatagcctgaggcggaccaggcagcggccacagaccgaggggcgcgggcgcatcatggctgagttggtgtagcggagccaatgtgagttaatctatttctttacaaagctcgatgacgttgggcggtgaaccgtggcagtaagaaaggttattactccttccgccctgaataattccaaagtctagaagctacaattattctgaaggtgtaaaaaactaattaattccaatactacactatttctatgtatgtcacatgtgcctatctaggggctactgcaaagccacctaggtaagcttgtaaccggccgaccacggagctacttattgcccttagccactccctccaagaacccaagcaagaacgccttgttgctcggagaagaaacctgctgactattggtgtgtgcgccagcatcagatggcgtaccatgccgagaaatagaatcaccgctgctcggacgattgcgggacgaaattgggctgacaaaacccgagaatgctgccggctgctggttgacagctcgggagtcgaacgcggtcgtagaaacaggcgacggagagacaggcgctttactaaagagagacaaaagtgaagctttctgctcagcagtttgactcggtcgacggtcaaagttgctctgtgcggctaggccctgggtatcgatcccaacgcctggcaaactcaatttgcgttcaatagcttctgtctgaggagctgtggccattaatgcttcatatccgggtttttctgaccgacgcagaatctgcggctggaaattcctgataggttcaggcgcctcgggtattttcgcaggcagaacctgggttgcttgtgcaacgggtctcgacgaggatacctcccgtttggcagaatggggtcgcgatagaatggtaatcggtgaggatagctgctggagctggggttgctctcgccggttcacgtggttctttcggtttgttccagtgtttgacttaggtggttggccatatgtctcaaattgtggcacgttcaacggtccagacacggtagccgatatctgacctgctcccggaaggcttctcgttgcggcaatctggtgcgtgggttggtgatcgcgaggacgctgaagaatctgcttctctgaaggtgccgcagagggtacaacgggattgcctaacaattccgctggttcagaaacacgagcagtttgcgcacccttgagcaaacccaaaagactatcctggtgctgagacgtcttacgtgtgtgagaagagccctgcatgggagccgccaaattcgctggacccgggcccttgggggtcttaaccttgaaggcttccaagagcgccagggaatggcttgtgagcttcggtggaggcaatttgctcgccggtgggacgactgggccccgggtttgagataactgagcggattcagaaaactcagggtctcctgtccgttgaaacggtgcgggcatatggctcgggttcagaacgccaggggccataggaggctgattatggtgctgatattgagacatagtggtggtttgggggaattgtggtatcgcgttaggtttaggataccaattaggcgcactggtcgggaatgcatcgccgggaagagcttgtgggccattcaagaagtgctggatatgaggttgggatgggacggtgtggaatggtgtggagttctgccgcatgaaaggagacggacccatgttctgctgctgctgagggaagccggggaagaaattaggacccaaatgaggccgttgttctgcagattggacgttggactgagatgcattaggtggcgccatagcattaccaagagaatcccgaggggatgtctcttgacgcccacgctgcaacaaagcaaggagcccactcgccttggatgggtcaacgacagaagcccgagctggctcggagcctggtgtattaacttgcgccggtgcggcgcagatgttcaaaaggcgtttgaggtgatccgaagcatcttgcgctgaggtcacctcaggaagatcacttggaatggccatttttgcgagggacatccctggagtgccattgttagggccattctcatccatagaaagatatccctcagcctgtgcaacttggtttgctctcgcatcaagcttcttctgctgcgctatccactttttcagtgggctgagaaacggggcaaccatgtagaacttgttcgcatttgcgactgcaagtccttcatcgtgctgtttatttttcttcagcgttggcagctctgaaagcttgtaccactcaatcttgctgatttcctttcgggtacgcggttcaaagtaagtatcacggagcacacctcgaaagacgtagagtcgcatatgctgctctctcatcgtaatctcaatgtatttaacgtcgtcgtcgtttttaaccaagttggcctcccgaacatcgaacccagtctcttcatagacctcacgaatagcacaatcaagatccttttcgcccttgttgattttaccacggggaaaactccagttggcgcccttcttccagcccttaaccaaaacaacctcgtccatatcttggttcaacatgattgcaccgcggaccggcacgcgcgtcttgtaatcaaggaattcttggaaggcagccaaatgatggtaatgagaccatgacgacataagcgggcaatgttggaaaatgcgcatagcaaatgtcttcaagttcattgacggtagcgcggggtcaagcggacgaatgaagtcttcgtagaaccattgtgcttcttcaacttgaaaacatatccgttcaaccgactcaagctcctcgcgcggaagattgataatgaaacggacgcacaaatcatccagccctgtcagcaacggcccaccggcctcagtcagcagcccgtcgtcattccgatcgatcaaccaggcactcacaatcttctaaccgcatatttgtttcgatcatatcggtaggtagactctggcatttcaaacccttggtggctgagaaataactgctcactcaatccgacagcgcaaacggtcgaaataagcaagcaacagggtggagggaacagcttccagggagggtgggccaacccagggctgtgtggatatggtgaatggaatatggcggagaataatctcagcaggaagtacagtatgcgaaagcagtcgaggttccaatcaagtcagagaaaagagttgaggtgttgggaagcagagcaatgatcggagctgcccaagatggtgatcgggtgactaaggtaatgtgtggcggtgatgaaccaaaataatgtgccacatatgaatgtggctgtgctgtgggttccaagattctcgggttatgacgtgttgtcgcgctacctgactgttgatctcctggtgttttttgggaattgctatattaatcctcctcgtttcatagtcaagcaccttcctcaaaaatccttacgcgccctttatcttcgctgaatataggtgaaacgagcgcctaccgaaacacctatctatccaaccaggaagcgtttggggcctgaaaggatcaaaggctatatgtgcattgtttattttagttgcccttgctcaacattcgtctatttcttcagcccttctcccgtgaagatttcaatttctgcaactacttttatctcacggttgatctaaaacaaagatgtcgaaaattctagtgtctctgattagcaaaaaggtgctaggtgaaaccgccaataatcatttcggtactgaggtgagtccacttgaccgaccgacattcatttggttttgcgaagggaggtcaggctaacccaatattttctatctgcccaggacccctacttcgaagaagttcctgcttcacgccttggtcgtacatttggaaaaaagactcaaaagcgtcgcaaggccatcccgccggggctctctgagcatgatgccaaggtcctgaccaaggtcaaacgcagagcttaccagctggactatgctcttttcagcttgtgcggaatccgcttcggctggggaagtgtgattggactaattccattgtgagtttcaccaggatctatcacactagcaccgggaggagaccaattctaacaaatgaacaacagcattggcgatattggcgacgctgcgctcgcgatgatggttgtgaaatcttgcgaaggaattgaaggtggacttcctgctgctttgcgcatgaagatgttgatcaatgtgattctcgacttcgtccttggcctcgtccccttcattggtgatcttgccgatgcagtgtacaaagcgaatacccgaaatgcagtcattctcgaaactcatctgcgccaaaagggtgccaaggcggcctcgcggcagggcgaaagaaggcaggaccgagtagtggaagtcgacaatagtcttcccgatacatttgacagacaagaagatggagtcgtgggtggccgtccaccggcctatgacgatgtgcgaccttcaggtcatgggggaaggggtaacgatgccccccagccggccaaacagtcccggaacaagtcatttggcagatggttcggcggtgcggatcatccagaacatgatttggagcgaggtggagcaaggtaatgcatggtgcatgaatatattgaaatcgtaattccagataccccaagattgtttgtcgattattttaggtaatgcgggatgttcgccgttagttagttcatttaattttgtcacgaatcaagaatgtttgtcttcagcaaagctcccctggtcgagacctcatacatccgtagcagaattgagagctgtggttatcctctgcctgattcgcaacagtaactccggaattaccctgaacatttcccactaggctagcacaaagagcacacgttggtgcattatcagacgtggaggggttcagcttgtttgcagttctggccacattcgccatgacacctggatactttgcaccttggttctggacatatcgcagcatcaactcgtcaatagagaggttcttggtaaggacattttcggagggcggttgatcaggtatgacgatatcagagagctcggcacagacgctcgcatattgaagtaactcagccttatacagatcacggagcgggtactcgaaccgcacgccccaaggagacatgccgtcagatacctgccaggtgagggaagccccacgtcccttggcgacacccgcaagtgctttcgcagccagacggctgtccgagtcaccccaaatcacagattcacagccagactttttcgcaaattcaacgatcaatctggtcagcaagacggtgtcaacgtcggccctagaagtaggggtggaaatggatgcacggaaggcagctaagcggtcttcattcgaccgagtgctgtcatctgtgaattttgatcccgcatattcctgcatgatatcttccacttccgggacatagtcgaagatgctatgaaaaggtatccgactgatagtgtgcatcgggaaattcttttcaagagcttcgtagttcttatcgaatggaacgcctgtagccgcaacagttgaaggttcgatgatcaggatcttgaagtcgtatcccagcgggcgtccattgtccaggcgatgttgtcgatcggtattcaatatatgcaacaagaccgaggaggaaacaccaaaagacacaggcagaagcaactgggttttagggccatccaagccaaaagctctatagacactcaagcgcgactgaactttgtgtgctatgaagcgcctaaagcaggagctagagaaaaaaattaagtcagaaactatgagctggaggggttgtagattgtcgacttgtcgcatacctgcaaagctgcctcttccgggcaatgaggtcgaattctgcatccttgcattccatgcatgacttgctcagttcctttgctggcataatgactgctctagagtatggggctattcaacctggactctgcactcgatattgaaaaaaagtcgaccaaagctggaaactaaaaaatggtggcggtgcccgcttagataatggccacgcgcggcttccccggtttagggccatcgggttaaagaagaacaccttagccttacaaccctttttctaaacacgccttaccatattcggctctctttattcttgctcatattcctttatttgatgctgtgtggtcttaaaggcctcatcctgaatctcggagcatagtctcgcttcaactctacggtcgccatgaagggctggctccagacattgggcttgacggccctattggcaagctatgcgcttgctaatgacgctgaactagtatgtccctgcactccactatgggaaattgtcagggtctaacgttgttctgcagaaatccgatgatgcgcaccgacaacgatgctcagggatgtacagtcgcaaggcttggggaggagatgttgatcccttcattttggtgaaatttaccaagtcggaagctcaggaaagtgatcctttggctagtttggtaatcttcgaatggtccgatgagggattgattggccaataccggtccggcgatgctgaggtatgtctgtcaacttcatggggacaaccgacgcggctaattattggatttaggtcaaggaaacaatttgcgatgcctccaatgttgaggcaaaaatatgcactcaagaacagctcggctcttttgttctcaccagcaatgccactgacgtctccaaaagcccaatcatatcgaaagcaatccacctcaacaaccccgacgccgtgaaataccctgtcagaaagactggattctactgcgttagcacgtatgcatactccgggcaggactacaaagcagtggttaccttccgaaactcatacggcgaacttcccgctgcacaaatcgcaaagcttccattttatggagccttgacgatcgtgtacgctgttattggagcgtatgtaacttgcaaaatcgacggactcgataggttttgaactaaatgcttacgcgtaactttagattttgggccttcctttacgtgcagaaccgttatgacatttgtatgttgggttcccttctaccatccgagccatgctaatactggatagtgcccgtccaaaactatatcaccgcaattgtggtgttcctgatcgtcgagcagctgatgacgtggggattctatggtaagagacaacaattgattccttgcttgacttcttctgatttttctagaataccaaaaccgccatggtctgaatggcggcgcaaaggcccttatggtcattgtagcagtgctcaatgcgggcagaaatgctttctctttcttcctcctcctaattgtctgcatgggctacggcgtggtcaagcattcattgggccgtaccatgatctatgttcgcattttggccattggtcactttgtgttcgcggtcgtctactcggttgccagtctttcgatcacccctgatagcgccggtcctctagtgcttctgattgttctgccccttgccggaaccttgacagctttctacgtgtggaccttgaattccctgaacgcaacgatgaaggatcttattgacagaaagcaaaagacaaaggcgatgatgtacaagaagctgtggtggtgcatcctcggcagcatcattgtgatctttggtttcttcttcatcaactcattcgctttcgctggacgcagtgacgccagctttgtgcccgaacactggaaggcgagatggttcgttcttgatggctggttaaacctggtttacttgttcgatatcgcatttgtggcttatctgtggcgaccaactgtcaacaaccgccgcttcgccatgagtgatgaggtatggagctcttccctacatatacaagagcagaatcgagatgctaacatcccttacagcttgctcaagatgacgatggattcgagattcgatcattcggcagtggtttggatgaagaagatgcctatgatgctcccccggattatcctggcagctcagccgccgagggccgtgatctctccccagttcctcccaagcccttttcctccgcaccccgccatcgcgagtcgctcgacgaagagacaatattcgcagtcggcgaagaggatgctgagaggtggtctgatgatgaagagtctcctcgcaattcaagcgagagacagagactcaccggcaaggacaaggattaaactgaacattgactcgtctttttttttaatacggtcgttttccctggttagtgtaaaagccgatcaggaccagatatctggtagattgatggggttgtcatttcacttaatgtacaacctgcctccagggcaaggatgcaagcatatcatggcgttggtctttgcttcacacttatgtcaaatacttagttctcctagctctctttttatttatattattggcttatatcgtgttgcttggccacgttcttggatcaagttaataaaatagcgcaggttacatctttgtggctatacggtatgaatttatccgaatccgaattcaaaacacagcccactatcactgtctagtatcattctcatttcttttgcaactccaaacatccgactatggatttcgatcatattgctgagaataagaatgaacagaaggctactatttggttgaaactttggtcaagccgaagcccagaaatcttgtctatacagcttgctaagaagcatcgcctagtaaacctgcatctgcacacaatccacgtcgctttcatgaagctgcagtaccctgatttagcttaagggcaacctgacctagtcaaatagtggatttacctcgaggacataccttccaacagttcggagtcttcatagtaataaccgcagcacaatgtcaaatcgatttaccaataacccgatgtatttggccaaggatgatatccgagacgttatattgagaaccctttgaaggggctttcttgtctttttaggtttttttatagctagaaccttctataactaaggttcgaacctggaggccctggatttgagtcatccggagagcctcaagtggacctcgggagccccagtctctctcgtctttcaagatataaattgatcatttcagtataccatatttccaagctgaacaggactttgaaatgttttgactacataagaaccgataaaagcagtcttatcgcacttgccccacgaaccatcaaaacaacagctccgactctcagacaacacacacaacaacattagcagacgcctcacctgcatatgcaaggcaatatcaccatcttcaaacatcacatgcctgtagccagtgcctaagcacacacaatggcatccgagacgcatccccacgtccccgcaaacccatcctccatttccgacaaagaaagcgacaacgacaacgcaagcacagccaccgcaaagccagaaccccaaacaacagaacccagctccagggctagcacgaccctctcagcccagctgaatcaagaatgtaacgacctactctcccagatcgacacctaccaatccctccttgcgaccacgctacggaacccacagcttgtcgaggtgcgccaattccgctccagcgtagcctccgagctgaggatgctggagaagctaggacggcagatcgagggggcgattggagggacaaccgcgggaccggaaacaagtcgaatggaagatggggtgacggggtcgcgtgatcctgatttggaaatgcggcttgtgcatgcgcttcgctcgtccaatttgccgttctaccaggctgtctggaggatcgcgagcgggtcttgttctgggttggttgcgctgggtaaaaggttttactgggatggggagacgaaggcgacagagaggaagagtgctagagggaaggggaaggggaagggtgagggtgctgcgcagccagagaagcagcctaacaaagataagcgcaagagtgtgtttgtggatattgtggctgacgatggagaggagtgggtcaaggtgtctactgtctcggagagccggcttttgttcgagatggcaaagaagggctgggagggtgatagtgatgatgatgagtggtctgacggaggtaaaagacggactattttgcagaattttgatgaagatgggaatgaggatgacgatgatgagttagagctcattaaactcgcccgggatctaaagaaggcgtctgacgctacgcgcgttaaatataaacatcctcggctacgggttgttatacctaagattgaagagggaagtgttcctgagattgatgctgtcttgaacgagatgcggagctatggtattcgggttgactgccaggggaatctgccagcagagactcgcaccgggctagaccatctgctgcctcaaccgttcaaaaacttcacttcgactctgaatgtcgactgcactttactccttgccttggtgtctgacttgtctcatatcaaggacatcccgccaccaccctatgtccatagagccatcgttcgacaaatcgaagttgagcgggaaaaaccactgctcacttctgagctttggccggctatggatggtcgcgagctcgtatccacgacagaggctgcagtgcgcttccgggaaattgtcggaatcattgggacagagacggaaaagagccggactcgcatgttgctgggagatccaccatacgaacaactcgatcgtgaggctgttctccagaagtttcaagaattgtctgattatcaggtgcccacaaattggaaaatacccatcaaagtggttgcagcccagccagtcattgacgcggccaagacacaaggtcacctttatccagtggtacatgaagttggacaaggcctatcggacatcaatcagagcgtgtttttgtacggttgggtcaccggtttgacaaccatttccagcaatcgcacaattgacaaacaaatcgaggccaccgttgaggacaacaggaaaggcgatgatgacctaagaggccctgacgtttggatctgtgacacggcacgaagtttggtgggcaaggacaaagatcgaaaagtataagcatagaggttcggtcatctgctagacggttgggatagaaggcgcttttcttgacgttgacaatttctgaacatggtgccattgttctgctgggcatccaatcatgcagtatgttttatacaacgattggctgagagtttgagagaaaatcggagaacttggtcctttccatcgcgctatcagattttatttacttctctgaagatttgccgtggtcgtcagggacatagaagatgatttccttgtcggcactggcgatcatattgtaacgcgggttgtattccaccatggccgcgcgatttggagcagacaacctggccgagggctgcagtgtgatgtccccccgggcgatctgtcccaagtcccacacgagcataccgtgttgatcaccattgcctccaataacgtatcgaccatcgggagtgaaacaggcgtcgccttgtccgagcggcttgccggtcgtagacaccggtgcagcacgaccagatgatccactcttgccttctaggaaagccttgagtgtaccatcaaaggcatctagaataaagtgaccatggtagtccgttccaagcatcaaatattttccatcattggaaaactccaatcgagtccatgctcgtcctcgcgttgacggtgtgaatctctcctcgtattgtgcaaggtcgaaggtggagaagggcgacttgtcaaagttgcggaagtcgtaaagaaggattgaagctgtggattgagaggcgattgcaatgactgtacccgaagggtcaaaggcagcaaggtatggtgtcgcaaggttgagctttccctgcgggttcctggaattcaggtcccacaatgtcacagtatcgtccttggagcacgacatgaaggcgtcgctggccggggattgagccagacaagttacttggtcgttattgccggtgaaatatcgtatgtatccctcgttgtgaagatccagtagccgcaaattatctgtcaatggtgagctgggtagccaaaagcaaaggcattcagtcgcatactatcaatcttggtactcgcgtgaaggacctggcgagagtgatgggtgaatcgcgcaagatgaacaccgtatttcttgctggcaaccgatttattgtatttgccctctttcacgtcataaacatgcatactatcatcgttcccggctccgatcagaacgtcgccctggtcatcaaagtccaaagaggtcacgtatttggacgggtcttttttacaagggtggaacccctacagaataatcatatcagaatggtgccacagtcccaacattcaattggacataccttggatggtctgaaggtgtcaatgatatccgtgattttctgcgacttgaggggagcttgggcggggaccggaccctgctgaggtgttgattggctttcagccatggcggtatggtcggtgaagggtccttaagatatattatatgaaggaattgcagattgcgaataataagagcttgacgggaacgtgaaaaagaggcaaaaaatacatagaactgataagctccaaattgaagctccgcgactgggtatttttgcgcgcctcaccgcctcggctgacataagaattccggggccgacgccggaggccccaggctcaattgaccaatgagcgtttcaccgagtcccagttcgccgcatgtaagcttttatgtccacggttatctcagggcgcgtcttgactcaacttctgcaatatctggccctaggtgaaaatattgtgcattcgttcatattactcacctatacttcaaattgcgacttggctatacagcctcaataaattgcacatatcccgtggaatctccgctactggccgcatttattttgtccaggtccgatattcctccgctaaccgacaaatctgcgcaagtcacatataaggcgctatgtctactactgcggggtatgttatgtctaagtgtgggatatatacaaagcctgcgctaacagcaattgtggttaaacagcgcgttcatcgcaggtggcattgcagcatgcggtgcagtcacggtcacccatagtttcgagacggttaagattcggttggtttcctgatactccggatatgctaccattatactgactataattggttccaagccttcaactgcagggtgaattgcagaacaagaatcaggcagtgaagatgtacaagggccctttacacggcatcaaagtcattttacagaatgaaggacctcggggtctgttccgaggtattggatctgctgtatgtgatgtcctctccaaatggcatataaagacgcattgatctaacattcaggtcatgtagtatatctaccaggtcttgcttaacggctgccgtctgggcttctacgaacctatccgcgcaaacctcacaaatgctatatacaaagatcccaaggtccaatccctcggtgccaatgtcgttgcaggagctgcttcgggtgtcattggtgctgcagcagggtcgcctttcttccttgtgaagacccgtcttcagtcctactcgccgttcctccccgtcggcacccagcacaactataaaaactcctttgatggccttagcaagatctacaagagcgagggtattaggggcatataccgtggtgtcgatgctgctatgatccgcaccagtttcggcagtgccgtgcagctccccacatatttctttgccaagcgccgtttgacccgccacctgggcatgaaggagggtcctgctttgcatctggctagtagtgcagcgtctggatttgttgtgtgctgctgcatgcacccccctggtatgctatcttgaacatggggctatacgttcttcgctgactttcactctagacacgatcatggctcgtatgtacaaccagacaggaaacctctacggtggtgtgtttgattgcttgctcaagactatccgcaccgagggtccacttgccatttacaagggcttcttcgcccatctcgcccgtatccttccccacaccgtaagtgacaggagttgagccttgctttggtattattcatgtactaaccccacttctagatcttgaccctgagtctggctgagcagactaacaagctgatgcgccgtgtcgagaaccggatcctgcccgactctttccgcgagggaatctaagcaccttatgggatatattttgaaggggtcttcttgcgagatccattaccagtgtatgcattgcctggctggggtttcttttcgaatgttctgcaccgcacaattgcttctcaccgggaatatacctggcgttcggtagagtagctgttgatttcaaaattcgcaagtctgtacatattgttcttcgcatattgcaagcattggaaattcctttcgggtatgtaccttcgcattatctgatcccccactgttggtttccccggtacagatcgcgaaacacgagaacgcgctagcacgtggtgatgcaaggcacttccctgctagtattcccactagtccactagtctagaggtatgtggggttgccagtgcatccagagctcaaacctggcaggtggagatatctcaatggcacttgcaagggattactcgccacattgcattcgacccttgggaacagtgtcaataaatataccgtacaatatagacgactgtggtccttgtactccgtactccgtagatattataccaatctgacttgactccgtaaaatggtcaaacaaagacccctaacgttagctgcctaagcatgacgcagctaagatgatcggcactttccttttcggtccactctaagaaacttcctatggggtaaagggtaaacgatccttcattcctgagacttgacaggagcagccacatcttgctcgctttgtttgaaatgctatggactacctaggcacatcatgtatcaagtcgagattaacgcttgagaataacccctggaacatgttaacaggtacagcagatggaacgcgtgtgtggagagttgagcaaacccttacgccatgaaaaataaactaaaaattggcaaatgagatgctaacgccaggatctagaccaataaccaaaccaattagatccgtaaatccggattgttttgctagtcgcgtcgcgtgtttttgtgcccaagtggattgtctggcttatctgatcgtgatcaatagtggggaccgaaaattggagacgcgtgggagttgttgatgtcttatatgtaggtttatgaagctacataagtagtggctggatactgttatatggattggatattcactattatgtatgtatcagattcgagaaggagtgatatacagatgtagataagatcggaatctacaaacctacaaacaaagtactacaaaatctatattcacatgcacaagaatggagctggaatggagctcggccaagctcggccaaggactatcctttcggatgtcgctgggatccaagtggcatgagaaagaaatcgcccaaataggaaagaagggctgggaaaaacacgcgccgtgcattacctaagcggtgcgcgcggtcacgtgcgacgtgacttagcacgtcgcgctaaagagaaatcggcagtacttaatcgagtttctcttccctcgtccaactccaaagttccaatcccactatcaaggcttctgtctcattcttacctgctgcctttgttctcaataattgttcttgtgatatcacatttctcacataattgttccaatggccgctcaagtcactccctcgaaacaggtacgtgatgtcacgtctcttgcctctcgcctctcgcgtccgacgcgtcgtgaagttcgtttgagctaacatttactttttcttaggctgcttcctccctcgagaacctcaagatgagcgattcacctattaagaagctcgacttccagtcgactggcaaagagaacgcgcccgcgtctctgaagcccgtcgatgcccccattgagaagcccaccgagaaggctctcgcgtccaagcctctgaccatcaaggagatggaagcgacagagcccctcctccaggagaacccccaccgtttcgtcatgttccctatcaagtaccacgaggtaagtcacgtcgtcgacgcgtcccacgcgtaaagtggatatcgacaaagatgttctgccactgtgaacattgaagctaaccgtatccctcatttcacagatctggcaaatgtacaagaaggccgaggcttctttctggaccgccgaggagatcgatctttccaaggatcttcacgactggcacaaccgcttgaacgacgatgagcgttacttcgtctcccacgtcctcgccttcttcgccgcctccgacggtattgtcaacgagaaccttgttgagcgcttcagtggagaggttcagatccccgaggcccgttgcttctacggcttccagatcatgatggagaacatccactctgaaacctactctctgctcatcgatacctacatcaaggagcccaagcagcgtacctacctcttcgatgctattgacactagtgagtgattctcccattgacttgatatttgtccaattgtctaacctggcacttagttccctgcattgctaagaaggccaactgggccctccgctggatcaacgaccgtgagtcaaccttcgcttcgcgtctggttgccttcgccgctgtggagggtatcttcttctccggctcattcgcctccatcttctggctgaagaagcgtggcctaatgcctggtctcactttctccaacgagttgatctcccgtgatgagggtctccacactgactttgcttgtctgctgttctcccacatgaaccaccgccccgaccccaaggtggttgaggatatcattgtcgaggctgtcggaatcgagcaggagttcctcactgacgctcttccctgcggcctgcttggcatgaacgccaagctgatgtgcgagtacattgagttcgtcgctgaccgcctgctggtggccctcggcaacaagaagtactacaacgctaccaaccccttcgacttcatggagtccatctccttggccggcaagaccaacttcttcgaaaagcgtgtcggtgactaccagaaggctggtgtcatggccagcaccaagcaggaactcaacgctgagggcgagaaggtctcaaacgacggtggtctcaacttcgatgaggacttctagattaagtccttctcccttccctcttgtgttgttttataccctctcccctttcacgtgatattatgccgttttgtctcttattgattgatgtaattcctgtttgcaggctcgcatgggaatggtgtttcttgtttttatttttcctggtctatcctgggctctggtgcccatggatgaatggtggattctctgtatctagatcttcgaatgactccaatgtgtcttgatatatgtttgtttgtatatgtaacataacatattaatcctcctaaatatacgttatcaattggctagtcccatcccatccctacttcacactctattgaaactctatgtatctcaagacctcctgtggattttgccctaactcgaagttggtatgtcattcccgataccgaaagacctcaatcccatatctatgaatgcatcataaaaagtaataagcgaaaagaagcataacaaacaaagcaatgaatctcattcaaaagaaaccagttgatttaccgcttccccttcccgcccttcttcttccccttcgcactctgtccctgcgcctgcggctgcgccttactggcaaccggcggcgtcgcaacctcctcagcaggagcatcgaccatatccacatccgcgccggcagcaggcaccgcagccgataaccccaagcccgctacatcagcaccggcagccagcttgcccagacttgtaatcagacggccgacttcctgcgccttgtttgtgcggtagtgcaggcagattccggtggttgggttgaatgttttcagcgtgagggttgcgattgaggtttgtgcgggtgtggtggtggaggaagcatcggtggctttggcgttttttcggacttgggatttgtgggcgcggattacgtttcctcgtcggtttgtggggaagttgtattttgttactatccgggtctgggaggtttgcttgttagttaaatttggatttggattggggtttgcggttggtgttcattgttgcccgctgtgggggaacgcggtgtggaagattggatggtgggttgggatagagggttctggtgcttactgtctctgggtacgcttgtaataattgcgcggactgttccaggtaggcctgggaggtggataggtagggcattttggagtagtggtgagcgtccgtagagctcgtggttttggagttgaggtgtggtgggatgcgcagattggtgggtgtttctcttggtgtcgcgggtttactcagaatgagatgtcgcggatcaaaaggaaatgtccgctgagattcaagactcgagagagaaactggttatgaaagttggtggatggagagagcgtggaggtgttatcgttgtgctggcggctttttccatgtcttggcatcaatacgttcactccgcaatttataggaaccactctaaccaactagttaaccaattctcttttattatcctatacgatgtgcattacttgagatctaattaaatacgattattggacctaacgagagccatcaaccacatctacttcattaggctcagccaatttaccgaagatcgcagcttgtatctcataaaccattctgtactaagtagcttaccctcgaatgtaagcgtccaagtgaggtgactaaccgcgacaaaccagagatcatgcaatttctgccaagccttacatagtggaatatgcgaaacatccgtcctgttgtgctagagaatgcctttctcctctattattacatcccctcaacaaggcacggagcaaatcagcttgatacctttcactctacacgatagataatcgactcatgtcacaaaatgcctatgttgagcctgtgttctttgtaggctatagtaagctgcatcgctcgcagcaaggccttaacggcgcactagagtggccgttgttgagggacctcgtgggcaatgtgcaaggataccaagtgctcgaccttggatgtgattttgagtggttttctcggtgggcacaagaaaacggagcttaaaaagtccacgggatcgatatctctcggaacatgcttgagcgggcaaagagtttgactgtacatcccgcagtcacatacagtatcggcgaccttgatacgatcgagttggaaaagaacttatatgacttggtatacagctccctggctttccactatctccagaatctgaaggagctctttggacaggtctacgatggattgaaagccggcgggcatttcgtcttctcggttgaacatcctatcttcacagcccctattattgcaccggcttggactgaaagtgctggtcgaacagcggcatgggctgcagactagtacgctgaagaagggcttcgcaagagggactggcttgggatggaagtcttcaaacaacatcgcacggtggacacacatatatcattacttctgggtactgggttcattttgacagcagtcaaaaagtggatgccgactagcgagtatattaaagaccatcctgagtggaaaagggagcgacaccatccacttttccttgtggttggtgcacgaaagcctaagggagcccaaacttgattcgattccggaccgacggtcaatgtctttatagggcttggttcgcaggctgggaatgcgtgagagaatgcgaggaactcccatgcttggaaaactatacaatatgccatttacacgtctcatcttccattgcatctggtactgtacataccctgctatcaaggcctaaaaactatacacattaaacacatatcgacatcacaaatacgtaaaacaaaagatcaacacacccatcctccaatcctccaatagaatgccaaacaaaacgccaaaacctaccatacatcccagaaaatcatagatcgtacattcgtagatcgtagatcatacatgcatcacatacatcgaaaaacaaagaaaaagaagaaaaagaaaagactcaagaaatgggccgatggcactccgaacaaatcagcttctgtttcccatccctccccttaacactgcggaaacttgtcccacgacagttttcacatttgagcacgtcttcctctccatcacccatcgaagaggaatagttactactcaagatactacctcctgaaatactcagcctgcgctcatgcgacgggattcgattcggactgaggaagtcactcggtttccgggactgcatggccagtgcatcgtgcgtgatcttgttccagtacgcgtagctgcggtcaccctgtatccagagtgggttgtcttgtgaatcagtcgcagctaggtctgccggggcgaatttcaagtggggttggggtggtggttgcggcttggagtttgaggcatttgcatggctgacatcttcgcttgtgcgattgctgtcggggtgtggtcggcctggtgatgggggtggagatgtagtgaagatggacaatgattcgttccggctgaggcttgaaggccggggcgatgctagtctggaaagggatgggcggttctggggggatggggtacgggttcggaagtcggtgcgggagccatctgtgctggagcggccgtggcggacgacggagttgcgccatgagacgatgcgctcggatggagttttgtgggaggattcctttccgattgaggaggcgatgctacggcgtgccgaattggagcgtcttaggatccgtcgtgagatggtggagttggcgttccaattctcgaagcgtcgtttttgatacgcgcagtcttgccggagaactttgatcttgccggagtagtcggcaaccacgattatctctccgtctggatgcttggatcgtgcgaggtacgagggtgaggcgtgggccattttgctgatgatggataggcgaggtgctgattcagagtgtttatgggatttctttgaaaagtctgttgactccggaccaataagggctaccgggggcggattgcagatgtcgtagattgggtcttctgatagcgccaggacctctttcgtttggttgggtgccattattgcagctgttaccatggcagactgtgtctcaaatatctccacagcctgcttttcggaatcctgttgcacaggcccaactggccacacgtatgccctgcgatcctcactcccacatatgatatacttgccatcattggtgaatgaagctctaatttggctgcaggtgttctcgttgccgcggaatttagcctgcaacgatcgatcattgaagtcgtacagcctgatgcgggagtcgttgctagtaaccagtaacttgatatcaccatcgtcatcatccttagggttgtccttgggaaccattatcgtatcgactccagtgattttactacctttggcgttgcgtccacgggccgatcgtacatgaatctgggctgatacctttaggccctcagtgtcatagatgttaagcatgccattcaaacatccggcaatggagtatcggccgtctggagtgaatgccacagcagtaatcatatcaggcacagtagtcacaaaagccacgctcttatcgggtatactccagagtcgcagtttcgtatcgagagatccagcgaggaaaaagcggtcgtcacgcgggtggaattggatcgaagtcacaaagtcactgtgctggaaacagcaaagacattccggtcgagagatatgccacagtcgcactgttttgtccattgacgaggagagaatgaagttattctagcgcacacgtcagcatggacgcttcccatcgtgttgaatgttttgagcatgcatactttactccagctcaggtctaggatacttcccgtgtgtccctcatacacctgggcgggctccggctggaacacaggtgccttcaggccggaatcgtcttgtgcatctacgggtgttgccttttcgtgctcattggcatcctcgcgctcctccggtgtagcgataacagtccatactcggaccttccggtcctggccagcagccgccagatatttaccatctttagagaatacgagtgcccagacggcccttccgatgttgtcgccattctgtagcaaggccgaggacgtagatatccgtctatctgcgggtttgggcgatgggccgctgccctccagttcctgtgctagaaacacgcggtcgaacgtcttctcttttttgtactgggctcgcaccttcagatatttcgacggagcagggtgtcgaggtatgaatccaattggatgatgtgaggtgtccatggacatgcggggcgtttcagattccgaggtctcatcttctacctccaacaactgatcttttttcttgcctccgatgattcggctgaggaaggaaacaccttttctgtagttgagaagagcaaaccacgggtcagtcgctggtaatatcacgtatattgttgcggcgagaatcctggggggaggcgaaaagagactcccggcacacaagtgtcggcgacacaggccgtcgggcgtaacttgtgtttccaaggcatggcaaagtctaaaaactcacttcttctctctaggatgtttcgaggtaggcaatgcatctcctcgtatcgggcttcggtctccctggccgtactcggagcccacagcctctgcttcgtatgacgcttttcccagtaacttcaggggaatggacttttgggtattggtgcgttggataatgtgctataacgagagcacggccctcctgtcagcttggctgcatcttcgtatccgcatctccgatgcgggttgcacaaagcaaacaagcacatgatcggtccggaagtattggccaatttggtgtggcaagtctcctgtgagagcttacctgcgatagcggatctatagcacttgactcggtcctctcgtgcggggaattcaaggtcgaatgagagccaccaatgactgcgcgtttggtatttcgaacatcgtgcagactatgagtcgagcccgaggggacatccgatgtggccgaggctggcagttctgtcagcgtctttccataagatttttctgttctttttcgcgcattggagttctccagacagggaccgaatttagagtttggccaagtctggagattcaagattcaactctcgagattcaagtctcaatattcaacttgcaaaatcacacttaccgggaaatgtcgagtttccggggctcaaatcggctatcgcgggggtcgtcgcgactcggagttgtagattgttgcttccctccgccatgtgttcagtcgcatgaggggtatcaggtaatatacaaatgcagatgtatgttcacagagacttgcgattaacaaaagaaagaaagaaaaggaagtaaagcggcaacgaccggatagcgctggatgacatcaaattcggggagatggggtggagacttggaccctccagggtttgcttaattgcttactgagaacgttaaatggagaagatgacagttaagagtatggaatagagaatagagaatagtaattatattaaatgcgcgattgaagctttctcacacggtcctttgcaatatcacacatacccttcaaagtcagtacatacatccagagtaagtaactcgataagaggacattacctgaatggtctcttcaatctctttctccgcattagcccggtcaatgcgctcgcgcatctcgaccataatcacgtcgcgattgcgcccattgacgaacgtgctatacatctcaagtcaacatgtatagatcactgcgcaagaaacatggacctacacaaaccgcaaccctgggaatttctcctcgtattccgcattgagtgctcgtaattgctccgcttgttcctcggcgccttcattcaattgggcctgttcctttttgctcagctcgctcagatgttccggattggctggggctcggccaagacgtggatgcgaccccaaaatgccaaacagtacgtctcggtcggtaggtgaatttgcggctgagagtgccgacatgcgacctcctaccgcatcgatgagggtggtgtatgaagagaaggtctggttggccagcacgggaatcatcagtcggtggagctctggagagggttcgaagagggtatcgagcacccgaagctgggcctcttggggtagggaggggatcgtcgacagcggggggagttcggccatggtggtttctatgaggatatgtatgaatatgaagaagggaatgtattgcgattaagtataaaagagatcgtacccgctttcggaggacgccgaggcggagaacagcgggaatagtcgatgtatgtatcctatagatgtgtacatgtgagctatggagactggaactgtttgtttaaccgtttgactatttatatcttagtgtgtttcatatgttgagtttaacattggacacctcgcattccttgaacacccaatcattccaacaaatccaccgtatacatctacctaatcaacaactgcactctattgaaacctgatacattattaaattacgccaatcaaaggtggagcccaattgagaacatgttccccctgagaccagttcgcctaaaccaactttgtttttatgaaacagccgaatctgcacctccggccttgattgggcacatcgcgatctaaagatccgatcccaaatcaactcttagtgtctttacccgctttctggggccacttttccctcctattctctcctcttcgctttacctttttgcgcctcctctggcccttctccatgcggctcacgctatgtctttgaatgggctcgatagtgcccccgtcgtcgaagcctaccaaagtgccctggctgacgcgggcgggtggtgagtaccccctttcggtgtttcaacgcactgtgcgacagatccattaacttcacttcactgacacccctatgtttcaggtttctattacactatgttgcaagagatgaggttgccctccacgaacgaggcgtcggcggggtgcccgaaatccggaatgccattgacggctacgaggaatgctcgccgctctatggcttcctccaataccggcgcagaaaagtgattatccgatacatgccggagggattatctcggcttatactaggtatgcccttcgctgcctttccataggaattgatctaatctgtcctagctcgaagcaatgtccagttccaattcgtgatcgacaagttcacccccaacgacaccatacttcctctgtccaaagcctccgatctcaccgaaagcgccctgtcctccgcttgtctcctccataccgcgtcgacctcaattacctcttcctcaagctcgcttcgtcgccgccgactgatggaaatcacggaggatgccgaggagaacggcacaaaggatgaagctccgaacccaatcacacatctccagtcggaggcccgacgcagaccaaggagtgtcaagtcggaagctaccttggtgccgtcgccaattgaacatcccgtggaaccggaactacccccgatatcaccagaaagtgaaaaagcaccagtcgatctcataccacccccatcccgatcgagctcccgagccacactctctcgagggagtcccgtcgaaccacaatcagcgacaatgtcccctaggtccataaaatcagatcgctcccgctccagttccaggtaccgaactatcttggatgaattcccccgtccttcggaagaggcccggttgtccagccaatccagccgtccctcactccgagatttggaacgagccgcgggatatacgccaaaggttaagctgggaccccgaccgtccgtggatagcagtggtagaccccgcacagcaggcagttctcgaaatttagaccaacgtcctgttgcatccctcccgacaaatatgcgctcatcttccgtgcgaaagcaaaacaatgacgcgccgcgccctcgatctcaggggagcactttcgcaatcaaacccactagtcgtgttccaccagtcccccctttgctggttccacccccctctatccctatttcgagacctcagctttcccctggcgccaaatccctcggagctctgtcgacctcctcgggattgacccctgagaaagaacgtttgatgaaggctttgcagcaaagaaggaagaatatggccaagcgtgcggaggaaacgaaaaagaagcaggcctctgaggaagggctcaaaccagtgaagcatatcgccaaggatctggatgccgataaagagaatcttattcagattcactatcccgattctgaaatgatgctgtctgagcccgagacaatccaacaggatcaacaggagttaccttcagccaattcacccgtgcctcctgactccgcccctgagcctgcctccgagtctattcttaaacccgcgttcgagcccgttcatgattccactcttgaacttgccaccgaacctgttcctgagagcgttattggatccgctcctgatcctgtcgtcgaggaaattgctgaattcagtcccgacctcgctcctaattcggttggatcaaatttcgaagctgtccgtgaattagtcgccgacccaattgttgagtctgctgtgacgcctgagccagagcagctttctgggcctcttgaggctgaattaaacccgatcggtgatatttcccctgcaagcgctgaggatgggccatccttacctacggcctcaagtaccgacagatttatctcagccgatcgtgctgccacaccttcagagacagttaaggaggaaacaatacagacaacccctgaggatgaaacacgcaccgagcacgaggactccgcaatctctggtctcgccccacctacctttaatcccgacgtcccacttccttcggatgccccacgagattcaggggacgtctccgaaacacatttcgaaatttctccagctgcatatgtaccaactgacgagccttctgacgtgcctatcttagcagaggtccctcaggcggttcccctcccctccgtcccctctattacccctctagagagcgttggcacggaaacaccagtcgcccccgtttttgtctcaatcgaggtggacgaaccgacccctgatcgcctagttgccgagatagccgagcctcttaccctggatcagaggcgtagggtccgcctggagcctattcaagtgcctactctagatttctcggacgacgacaacctcctttccgacgattcgtttatggaggaattgacatccgctactgtccagcaagctagaccggtatctgtgaaatctcccaacggcgtcgatcacgcctggaaaaatttacgcgccgtctctagcccgttctctatgggggcatcgtcgggtatgcaggctctagcagtgggccggtccgtttctagctcccactctgaaagtcgccctactacgccggttctcatggccaagaagatcaacgtctcctctggaatttccagtcgtatcaaagctcttgagaagttttcgagccgcgaaggcactcccttgggtgccagtccggctgtaagtgcgccgtcggcctcgtcgtctttcgagaaccttcggaaacgcgcatctatctcattgcccggtgggaaccacgaattcactccaccaagcacaatgcattctgctcatgtccctgagagcttttcccgtgcgccgagcttaagtcggcacaaccgtcaggtgtctgtggatactgcgcgacctgctagctctatttccgtgacggcccgtatcgtgcgtgatgcagatatctctcccgtgcctgctggacctgagccctcggagaccgatgttgtcaacccccaggctagtcctgtgactgtggagcctgagatagctgaggcaccactccctgagatctcgcctatcgagcctgccagccgtccccaggaccgaagcttgtcaatctcatctactacatctaatcgccaagcgacatctcgccctgaaagccgtcccggaagccgcccctctcccccctcgcgctctaggactgacgacagcgtccaatcagtctcttcgacgcccgaagataagaaaccatctcgcacttcgcgactcatacgccgcatgtcgtcgatcacatccaactctcgccggagcattatcggagcgctcagctcgccagtcaaggaagaggagtatgttcccaccctcacaaatgggtcgagtaaggcttcagagtctactagctcgcgtacctcagatgctattgaaattggcgaggtgaacgtccagttcccagaaactcttctatggaagcgtcgggtcatgcgcatcgatgaagagggatacgttgttctgacacctggcaccaatgatgccaccacccggaacatgactaaacgctaccatctcaccgagttccgcactccttgccttcctgatgaagatatgcaggaactaccaaacagcatcttgcttgatttcttagatggaaatacgcttcagtgtgcttgtgaatccagacagggacaggcttctgctcttcagagtaagtatcccttgcattttcttcgaagttggagaataaatagctaatcatctacagctctcatcgaggcccatagcgcccaccagcaatgatcctcacatttctcaaatgacaggactccttataccgatactcctgtctcccatttccattctcttctgggcgtcgcccacccttcctttggctttaccaactacacgcatctgctaaacctccttcgacatctatttcttatctcttctacaaccccctctgtacctctatagcttttctctgtcttatctctctcaatctggtgtgtatgtgttgtgatatatgtggcgtgttcttggtataccccgagtcaaaagagcttcctttttcctttcccacttctcgcaatgccaatctactgttctttgccatgtacagacagacagacagacagtatttctttgccgctccttttgcttgcctttcttaattgactttgctcttgcatacacactccatgccttcgcatagagtgttggtgttctattcaatgcactgtgttctcttcttctcttggtttacttctagaagctttatattctaatctgtttttgattgctattttcgtgcatgctaattttggaatgtatctaaaaggtttatttgattctcttcggttctgcgcgcgctattcaactaatgttcaaagcttgtgctggctggtagtgatacggtggtgtggttggtttgggagaagacaagtagacttagggagaatatctctcgtgctattaccagctatgtggttctacctacttttgggggggtatcaagtggaagcaatccgaaagaatcgtcagcgaaacatcgaaccgctagggctgtgcacatctagcaaattcatgccgcaacacccttctaacacccaacgcttatatatctccattgctaagctaagaatatagccacgggatatctgtagggaaataaaatcgttagacggtgtatcttgacagccgcgaataagaagtaattcaataacatactagagaggagggtatataattgtggcgctgtgtttttctcatccactgttcctttcaaaatccagcgatatgagattttgattgttcaacttttttttggatttctgataaacgtcatggctcataacgatcgttaatttcatgaagcgatcaggtgtaaccgttcgcaaggtcctcgagctcctgatcttcatcatcctcttcatcttcgtcattctgctcttctaatccctcggtctctggaatggatgtctcttcatccaggggatgttgaccgttttcagtcgtgccattctctttatttatagaatagaactccgggaatgcagtgcgcatttgcagcacatgcgcatcaacgacgtattgcatgaggttgttgacggggaaggaagtatgcatgcgtttctccgactccatcagctcaaccttcatctgcatctcccactcgtgctctccggcatggtccccaataatcttcttccgctcgtttttgtcggtggtcgaaaccaccttctcgcatccgggcatgcggcatgtccaggtatcagatatctcgtcgatgaattcttcaatttcatgtggcgtatctggagtgggattccgctctggagtcagagtttggcgtgatggtgacgaagatacggggggagtctggagtttatcttttttgatattgtccttgaacaggctcttcataagagaggagccggcgccggtcgaggaggctgcaaagaacgagcgagtccgaggctttgtggctgagaatggatctctgattaattcatagccacgcgttttgctcggtgtttcaatttcgtcgatgtcgatttcatcggtatcctcttcgtcttcctcgttggactcgactgtttgctggtttgcgggggcattgcgatttcgcttgccggtcgctttattggagactgtgtggactcttggacgcagcacagacttctgggtccggccgccttgttcatcgtcgctggattcttcctgcgaatccagaggggttaggagtgcagttggcagaggggcggatgtcgtggatgcatgtgtgagttccctatggataacatagcgagaccatctaaagtcctcttcatccatcatttcgagcacggcgcttgccctgaaggcaatgattttctgggcgtcttcgttgctgagagagaatcgttctgcaaagcgttctcccaggaggtcaatatgcaggcgacgctttgccaagtgaccttcttctctaaggtccttgagcagctggtagatggcatcggcttgtgattttgagattgctgcaggctgatgccgtggagttgtcacttctggttcatctgcgggctccgtttcgctttcctcggagggctcaagctcttctaacagcctattatactcatcctaagcttattatcagtatgcacagaggctattgtaaggagacttctttccttacattaaatcggcgacgcagatggacgaagacacttgtcttcttccattccacatctgaatcaccttggatcatgcaacgaagcaagaaggaagcatgtgtcccaaagacctcagctgactgttctcgggtctcacatgagccatatgtatggtaagtatactaaggagggataaatattaggcttcggtttgtatagcgcatagcttagaatcgaaagactcacttgttcgcagagactcctaaaagatggattgatctgtctctttccttgctggtgcttatcaaccaagaaatacagcaagtcaatagcctggaccatgcgattgtatgtgggtgtgaaacccttggcgggcgaaatgatgtcgtaccagcctgccttaccagcaacccaaagctcaatgctcttgtcttcagtttggccgtaggcatagtgtgttacttcgtcaataataatgcgcttaggagggttatccgggttgagcactggtgggcgagtggctggtcagcaagctgcttgataaacgcgcattgatacaacgatacacacctaagtgttcctggtcctcatgaagcggctctaagcagccgatcacctgcactggattttgttcggtggcatccagtagatttgcatatagcatctttccaggctttaggaccttcacatcggtcaggctgaactcccaccaatcgttctcgtcagtaacagagggattggtgggagctaggacggtttcttcgcgggacgtcatggtggaatgggcatggtgggtatcgacaataaggtatggaaaagtgttgatatatacgtaaggtcaattaactgagaataagagaataagaagaaggcgacttggaatggaaccttgtagttgtcaacagtcaaagtcgtcgaccgccagtaaattacggatacaataagttactcataattaattacatgggtgttctgcctggtttatcgggcatttataaatgaatccatcacgtgcacatggcataattacataacttagaattaaggttacagcggtccacggatccacggctctgatcaaaattagactccgatcggatctcagctttgaaaaggcatacatatgcatgtacatatctaggcacgccattcctagagagatgctctcggtcaatacaatactggagccgctgtgaagtttgctaaggtatggtaggagccggatccaccatgggtctaggtttgtgaccgattacgcaggatgggggttataagtggaagaatatttgatgatcaaggaataacgagatgtgtattaagtttcgatgctagacgcggggtgtggggaaagcattttttgaacgccgtctcaattaacgctttcctggaaccacaaaaaaaaattggaagactgaagccactcatttatcttctttcgagggcatccgtaactccatgagcagtgtattatcctctaggctaagcaccacattgtcagtctgtcaaaagagtattttgcttttgcatcaacgaagatcgtagactttacactgtcatgattgcatctctaagagctgttaagcagagagccatgtctggtgttaggggtaggcgaaccttgatagaaacttggcagttgcactccgatagacgaggaagacgttggctggtacagctactaggtcaaggcctttgtatttattcgctatataaaatcagaaaaatccatgactattaagacaaagtaccaatgtattccaaaggtagtcagtacggagtagtgtagaatagtatgtcaaggggtgcggtaacaggacattttgaactactcaatgggaatgtagatatcatcttggctttccctttatgcctgttattttctaccataagagaaaatagactatgaaaaatggaatctactaggacatcaaagatcaaaaaagaggcacaatgccttcaaattgcacttttaagaaacattaaaataatgccgaggcttttcatctataagtgctgtaatatctgtagatatctccaacaatgatctagaaacctgtatatcaattatatcagaatcgtagggcaatcgccttgtcagtcccaaagaactgccgtaaaggcggcagccaaatctctaccaaaataactttttcccccattttggattgactcccacctttccagatgccatttcctccaggttttcggctttttcgcaaaacaatgtctggcgagaagatccttgaaggcgtattcggtgagcttgaatcccactaaagcaagacttcgatctaacatctccgctagccgtccacaagccgcaaggcgtcacctccgccgacgtgatccgtactttgcagaaacacttcaacccctccaagacattcaaaccatggttagaagaagaacgcgcccgccgcgaccgtgagagccaattccagcgcaaacgccgtcgccaccagcgcctcgacgtcaagatcggccacggcggcaccttagacccgctcgcgacaggcgtgctcatcaccggaatcggtaagggcacaaagtccctccaggatttcctggcctgcaccaagagctatgaaaccattgtgacctttggcgcggagacggatacctacgatcgcctcggaaaaatcgtgcgccgcgcgccctacgaacatatcacacgcgaagcagtcgagaaagcactggaacagttccgtggggaaatcatgcagaaaccgcccattttctccgctttgcgagtgaatggaaagaagctgtacgagtatgcgcgcgagggcaagatgccgccgattgagattaagcaccggcccgttgaggtcttgaatatggagattgtggagtggtacgagcccggcacacacgagtacaaatggcccgaggtggagatgactggtgatgagaaggctgtcgctgagaagcttcttgatcaggaagcatcggtgcctgcgccgccggccgaaggtgacgctacaagccaagcgcccgaagcttcttctaccaagcgcaagtcgccacccccggcggatgaagtgaaggatgatggtgcggaggctgctaagaagcagaaggtgtccgagagcgaagcggcacctattgcacctgagcctactgcccccgaacctgcaactacagaggcccctgttgtgcctgcagaggagcccaagccccagcctccggcggtgaagattaagatgactgtcacgtcgggcttctacgttcgctcgctggcacatgatctaggcaaagctgttggtagctgtgctctgatgagcgagcttgtgcgcagccgtcaaggtgactacgaactctcccctgataaggttctagagtacaaggaccttgatgccggcgaagaggtctggggaccgaaggtggagaagttcttgacagagtgggaggagaagagagccactaaggctaaagctgaagcagcccaataggctatagtctaaaatgatatagcatttgtatatagacttcctatctgtaatatcatagagaaaataaatcaaaactgccattttttggttatccagacccaagcgagaaaaaataattacatgatgcacgatacaaatgcaatgtcacaacataacccatcacgtcaaaacgattagttgcgtcccttggcttggactctcttgctcttgccgggtcgctttgcgccaaccttcatcttcttagcggagaagttgctcagatcaccactggacgcggcatcaccgctcttagcatggcgcttcttgcctccgaatccgaacttggcgtccttcttctggcgcttcgagccaccggggccatcaccacggctacgcttcttgtcgggctgggtagcttcttcaatggcaacgtcgaacatatcattggcgtcgtcggtaggggcggagccatcagccttgcgctctgtgtgaaaaatcaggttagcgactgcgaaactcatagaaaaataccatgaatgaaacaaagtgagaacatactcttcttcaaggtgttgatcttctccaacatttcgcgcttctccttgtgtctctgctgcaacttggagttctggacctgcttgccgaacttcttaagatcacgctggcggcgcgcctcagcagaagccttcttgccagcagcctcctcgtaaagcctcttcttgatcaagcccatgtgctcgtcattcttcaccatctctgcgaagtaatcgcccggccgcgtgaagggaatgccatccttcttcagcagggcacgtgcttgggtagcagcaatctggcagaccttgtagaacgccaattcacggttcaggtcgtcatttgcgtcttcaacctcgatcggctctttcgagactaaagagttgtgctctgagaatggggtgttgggaccgatgaacgagatgcgcttgagggcggagaggatagcggcagagttgttgatcgtcaaacgttggtggggaacgacatcttcacgctcatcttcctcgaggtcggagagtgggatgtcttcttcctcttcctcgtcatcttccatctcctcgtcctggtcgacctcttcctcttcctcttcctcttcttcctcggcgccagagctggcggccttctcttcctccttctcttcctccttctcttcctccaagatcttgtcctcgggggcggcagtagccttcttggccttctttttttcggcggccttgatcaatttcttctgcttctcggcctcgaaatcacggcccttgtgggcatcgagagcctggagtaacttgctgcgcttgaccattcttgctttgtgttaaaaatacaaagagaaaattgtattttgtgtgatgtgaaaggaattgaaaaaaagaaagcgacttggtatcaaacccgcatcagagaatccacgggatttttttgaaatcgcgccagtcctgatcaagctagcgttaccgataagaccaagctagtccgtaagtggaaatatttcggaaatacatatgacccgatcccttatcgagcccaccgccctcccctccctctctacatgcctcacagtctgtacagcgaatgccatagtctcacaatggccgacgaatccaagtccccttctccagacaagctagagagctccctaccagagggtaagtctcttctatcccaaccggtacataccatcttcaagctccaaactccacctgtcgctcttactaaatgccatcagaactccgatgctcaaggccagctcaccgcagctgtggacgatctgctcaatgagctacaaagcaaattcgacaatgtctctacggagatgttcgggaaacgtgagttcctgcctcaatcgtcttccaccaccgccaatacattcatacctgcgaatgtgtactaacctatgtacatgcgcagtggatgacatgaccaagcgcctcgacgagctagaggcgtctctggctgctgcatcttcggggactggcgcgccgagtccgacaaaataaatatgaacgccttttacccatactccgcgcacagcgtttttggcgagagtgcaataagcgctacactttttggctgtccagctctgctgaacccctgtaccaattgcgcaacacatacttaattatggcatacatggtgttttctaaggctttgcatggaaccgccgtgtagcatgagcacaccggcctgtgtctggttctgatacttatgcttttacgatttcatagataccctacaatcaaacgaggatactcgtacagaagagccaaaccatgtttcgtcatttacttgcgtggatctagttcatatataacatggacatttttgaaagggtaaacccgaagttggtactcaattcatacaatatacagcatcaagcaaatattctcgtatacaattcaatccatttccattgaacccatggttcatagcatgcccggtcctcaatctagaatcaccgtgactatagccttaagccaaaaatccaagaggaaaaaaaacaatcatctagaagcaatgacaagcacttaaagctcatcgtgcttctccgcgccaacaaagctacggagaatgttgctgcgggagagaatgtcatccagcttctcgggggccgagccacccttagccaggaccttctggaggcgggccagctccttgacagcatattcctcgttcttgctcagcttctccgcggccttgacatagtactcggcgtacttgtcggacagaccctcggcggccttcttaacatcagccaccagattgtcgaacttctgcgccgcgacgctctcgctaacaatcttgtccagaacggcgatggtgcctgccaggctgtcaagaccgccaccgacggtacggtgagtaccagccttctcgttgatgaacttgacaaaggcctcctcggagcgtgcgccggagtaggcctcgggttcggtggagcccttggggaagaacttgatggtagggaatccggtaataccctgttccttgctcaaagcacgggaattctcggcttcggcgtcgaccttggcgataacaacgtcggactcgagggcgaagtcgttggcgagggtttcccagacaggagcgagggtcttgcagtctgaacaaaagacgtattagcaaaacaaaccacaagactagaggtacaattagggagtcaactcacgtccacaccacggcgcggtgaaagcgaccagcacatccttatcgccaccaacagcggtcttgaaagaagcatcgttcagcatctcgaccttgctagcctccttctgtgcgctacgaggcttgatgccagtcttctcggtgatgaaggcagacaggctctcgagatcacgaccacccttgtattcctcgggcttgtcactctttccatcgaaccacttgacagtagggaagccctggataccaaagcgcttgcccagcgaacggttctcgtcagcatcgaccttggcgatggtgaccttgtcttcggcgaaggcgaaggtctgcgcgagctcctcgtaaatcggggcaagggttttgcagtgaccgcaccagggagcgaagaattcgaccagtgcgggcttgccagccaggacaacttcgtcgaagttggtggggattaggtctttcactgcggagttgcttgcagtggcgacgccgctgagggctgagagggctccgaggagcaggaagcttaagcgtgccattgtgtatatggattttgatgtgagtatactttcggagaaagtatgagttcacaaagaaatgtggatggcggagtttaagctcgggggagacgatgacaaacaaagccgaagaggccacttggtgactccacaccgcagatcacgtccatctactgccaaggttgacatctacgacgtccataatataaaatagagctacttcccctatgctatatttgtgattattctgctcttgagtaatccaagagtttcttcttcgttttcttgatttgtttggtctctgttgctacctagatagttagtaatacactggagaattgctggtatcgtatttccttgggcaagatcggagctgttggcataaactgcaattgcaagctgcgcttgttaaccaagaatccccgcggtggttgatgggtgtcgttggcgaggtttgtccatatcatcgtctctctgccagccatttgtttgcgtcttcccagagctctgcttctttgaactccttgcccgtactctgtgtgcctacgtaaacctatcttgaaaattagcgtctggtcaacattcaacatcaggcaatactaaccgcatcccacagcttgaatgccaaatccaagtttccaataaagctctcgctgtgttggaaccattccttgccctttgccttgacatccgctcgagcctcgggagatgtcggattcgcctgtagaggtaggtcgtcgaggtaagttcgaaccgcaattccaagtccacagtcattatcatcaataaacggaagcctgggagaataggttagaacaggatacagcagagctaggctaaaggaacatacttgatagccatgtcagtccagtcgttgcggtcccgatcagcgtcaccactgagcagcagaccagccagtaccacctcgatcagattcctcagtgcagagcgcaccgcagaaatcaaagagcggtagcaaagaagttgacggcttaaaggtccagaatatccaatgctcttgtgctgaagcttggcaacgcatgcaacacgcgaaaccagcatattgaaggtcttgtcgtcttcggaccctctcatgggaccgccagatacatgtgagaaccagttcttagtgttgagaagacccaagcggatcatctcaatcgcaatgaatataggttcctcgaggttgtccgcaggatcgatggctgatagtgcctgcactagacactggccccacggagtgagcttgtgcttgtcgtcaacgtatccacggagttgtaggaagcgccacataacattagataaaatatcctcctgcaatgaaagtgcctatcgaagctgttagtcatcggtagtgtcaactctataggtaagcttacaggtgtttctttattagcaaatgacttggacgcaaactcagagtcacttaagctctggacagcaaacttaaacgacccgcgaggcgcctgaagcttcttgatactttcggggaatttatccccatggatcttccaggaattgatggtttccttgactgatgggatgcccttgaggttgatcgtccgctctgagttctcatcgaaccatgggcggatccgaatgactttcgtttgatagaatcgatgaagcgagtttgctaaaaggcaaatagactgggtgcggatgggtgtcaaaatctcacccacaagccggcggtaaatctcggtgtcttcggtacccagcggtagcgagatgcgaacttcgccagtcgtgaggaagttgggtacatcagctccaatgatacctttagagagatagaagtatagctcctctgggaggcgctgcccgataagctcatgcatatccgacgaggtattctctggatccatgggtccgactcgaccttccacgtcaatatagacatgatgcttcacaatcatatatgctcgcttatacaagtctgcgtagtgaagctcctgcatacggcgatcttcttcaaattgggcgcacagtgtcaatgcactgcgtccggctgcgttgaacatcggcaacgcatcacgaatggtggggcttttgccggggtaagcagggttctcaaagagtgggagggagcgcaggaagggggatcccagtagtaaacagaagtccaggaattgttcatttgaaagtcgacccagctcctcctggcaggtttgcttcgtgatccagaagaattgcgcgggctcggtgtcgatacgggtgaccagcttgtcaaggtcaaacaagagggcctcggagggggcgaaaacggcatcgactacaggattgctaccacgggcgaggtaggagagctatccataagaattggttagaacttacaacaatccaagcatggcgcataggtagccactcacctgagccacggcgctgtatggcgctacgatgaattccactccgttctgggtcaagattcgttgaaggaacttgaaaagtgtctccgggggcggggtgcctgagggttcggttgtgtcagcgattgtttgggagcttcgctgtacccagtggtaacgatagaggcccggcaggtccatcaccagggaaagggtgaaagaaggatagaaggtggtcataccagcactgctgaaggcatcgactacctggtctgcctgttgctggtcgtaaaggtcccaagcttggtcgaatgagcgcgtcgatgcgggctgggcgcggtgctctttcttgccgaattccaacccattgaagacgaagatagtggcgacaccaaggttcttgaaagtctgcaattccttctcgatattactcctcaaggcgaacgggaatccgcctagtgcgcctagaagcgcttcccgggttgactggttcacgagatgttggttgatgtagtgcgacgcatcaatgccaacaacggcacccttcagtgctgagaggggtagggactgggtacggccaacggcccattcatcgagaggtcggactagtcatggagataaaaggttagctggtgcgattgcgggttgtggagctgtgttattgcatactcggcatggttctggagcttgtctgtcacagggctgaaagcacggcaacgccgggcatcaaagcccgaaggtggaaacaggaggttaaatcaaaggatataagagcagatcaaaagctccgtgatcacaatatgatgaatcggagctgggattgtttgggttttccggaatgggggagggcgagatcacgagggggggaaggcggagttggagttgtccttttgttttttgcctcaaacgcatcacatcaatttgtttttcgcgtgtttcaaccacttctttttggtttcgggtcttttgtgggtgtattcgatttagttatgccatgttcaactcctatctgtgtattcagatcctgattatctgcttcctataggggaatgtacggcttataatgaagtcatgcccgatatgtgtttaaataggaacaaaacagtcacaattcgttatagcgtacaacaaaatcgtctagacaatgtttatcatccttgctgagtgaattcggcgtatatttataagatctatgcccagctcaggtgtataactaagcgggggcaatgacacatccggcggggttccatgtccattcaggtcggatatcgcctaactgactggagccgactattaaacaagaaattggattggttggacgcaatttgattatcgcgatattgaagatacgcgatagtcaatcatatgtgcactaatagtggtttcaaccctatcttcaactatatattcactccaaccttgaaccctaactgctgtcctatttctgtctcacttcagaatggcagacaccacagtcccaatcgagctccccgtcattgacatctccaatccccatgaccccgccgtggggaaggccatgctggacgccgctacaaagtatggctttctatacgtcaacagcaagggaaccgatttcaccgtggaggatgtagatcatgcatttggattggtaagacttgcattacactccaactgttgacatctatatgcataacatctgaccatctctatagtcaaagaagttcttttcgtctccctcacaggagaaggagacatgcaagatccagccaaatgtttgtaataagactaaaggcaaacaacacatccagtctaacaatatctatagaaccgtggctggtctggaatgcatacagaaaccctcgaccccgagcatcagcgggtaggttatgacctccaacccgcatatagtacgaagactgacacaggatatggcaaatagaccggagactttaaagagtatggaacaaccatatctccaagccttgaaatacccccaaccatgaactaaccacacaactagagccatgaacttcggcgacttcaaagacagcaaagcccaacagcttctgccaccgtcactggaaccccacgaagcagagatcaacggcttcgccgaactctgcaacaaaacctgcacccgaattctgactctgcttgctttaggtctagaggtacgtaacgccaccgagtctatacatccatcataaccaccacgcccagtcacataaatatgtaatctataccaaccatcaaccctagatccaagaagacttcttcacaacccgacacgacccaagcacaggagcgacaggcagcatcctacggtacctatactacccatcaatcttctcaccgacaacagcagcctacaagcacgataaggacgtgcgagccggtgcgcactccgattacggcagcataacacttctcttccagcggcccgggcagccagggctagagatcctgactccagaagacagctgggcgcctgtgcccatcgtgcccggcaccgcagccgaggcggaggggtatccgttcccgccgatcttggtgaatatcggcgacttgctgagttattggacggatgggctgctgaagtcgacggtgcaccgtgttgttttcccgcttgctgagcagcggagcccgaatccgcaggatcggtatacgttggtttatttctgtcatcctgttgatgagacggagttggtgcctgttcctagtgggattgttgctgcgcatcgggagcggactgggggtgttcctgctgatgggagggttggatttggaggtggagcggggaatttagttcctggaaagaggcctttgacggcgcatgaacatcttatgtcaagattggaggctacgtatgggttcactaaggatgagtgagggtggggatcacatagcttcaattttggcgctctacgaagcctgaattaccgactacatgtagcttactgggcattgggtagatgggaacagagtcattcgtgagactgggaataaattataaacgccggtgccgttgaggcatagtgcaaacacagaaaagacaggtcctccggacataaatcagaatcatagataggatgtgcaccaaaatgctccagatgaccataacacgacccaagttgtcggcaattatgcccatctactgacataggaaagtcgtgacagcgcaattagttatgagagaaaacataatggccaaaaaaagcaaaaggcaatgggcatattgccactggaggttagaatgagatatacagtcataagaaatggtcaaatgtggatgagcaatgaaacaagggctcggaaatgacgatccaacgtcaatggaccaagatgaaggcaggctgtgcgagaaagggaatatgagaaggctagacatataaaaggtatcttcgggtcgaaatataaacgccgccagattctgaaatgccatgcgcaagaggaaccttggaacagaatgaaaggcagacgcaagacggatatgacgctatgcgagtcggtatgcatggaaatcaaaacgaaactcctctggggtcgtcgggtcgtatcaaggggtcgtatggcaccagtgccggtggtatacccacgcggatttctggcaatctttgctgcagtatttggtgcgacggcaacgccgacatttggcgaactggcgctggaattcttcccacttgccacacttgtaataggcgcattggcggatgccacctctcgcctcatccttacggcagaggtttctcatcaccacgcacgcccagtattgcatgtccttggagtgatgtcgaacagtatacttctccactagggggaagatgttgaaatcctcggaaagaaggtactcgtcttcctcatcacatatatcagggggcgaaggggggcaggagtcgaagtcctcatccaaaagatagagctggtgatcaattttcaacttggggacaagatgggatgactggaagtatgaccggaggttgcagtatttggagacatatgctagtagctgaagagacatcaggacatcctcatcacggggcatggctgtcaagactccttgggctgcgggacgttcccgaaggtacaaagcgtaggagctaggagcgagagtaggagaattaggattgttggtagcttgggtaggagagagaccgagtccgccgttggcctgtgtgttgccgttattaatgatgctgccgtcgacagtcgaacgatgagtgatgttgaaagtctccacctccgggccgccttcagatggatcagtgacggttagatcatgggcgttagagacaccgtctagcatcgttgtgtcccgctcgtcaacactgtcaagttccatcctgttcgggagtccaacaatggtttcagcgggctgtcccatagcactatcgtctcccatggtcgaatcttcgccgtgggcatcatccgattcaccggacgccgactgctgctggcggatcaaaggacgttggcgggcggcaatagtctggggaaggctgcgaggttgtgagtggaggggaccacttggggtggtcggggagtcaggttgtgagacgattccggtctgcagactgggaagcatgctaggaagacgctcggtgtcacgcacaggacgtaatccgaatccatccgtagtatccatagagggaaccgcggtggcaagaggttgcattgaccgcaggcgattgctagcgcgcgggaaccgcccatcgttcaaccggtggttatgggcttcttggccaaatgtactgcgctccgggggagatgtcatagggacacgaggaggagatgtgatatccatggcatcggggtcgttaggttggctgtcttggtagaaaggccgggggatttcgatactcggcggaggggcttgtcgacgcgagtggtgcgactcgacctgcgggtgtgactcggtctggatatctacgtccataggggtggatcgagtggagacgtctcggttgctgctgggccttgactgcctggaagaggactgcttctcggaatcgagatcggtgcgcaatcgcaccttgtctaccaccttgatgtagttgttcagaatgctggcaatgactgggaccatgtcggcttccaccactcttgtcctcacactctcagagccccgtacaccaatgttgacaacacattgaaaggcgaggctccatttccacatttccagtaaatccttgctccgaccttccttgaggatgcataccaatcgctcaatgccgccatcgacggtgaggatatctcgaatccgggcggacgaggttgtgaggtatgcaagatggttgagagagttgatgagcggtaaagtcgatgtgcaatcaagggcacggcggtcatagagggtagtggtgatgttgaccgcggccttgttcacattgggaatactgaaattgacttcccgcatgatgaaagaatgaaaacggagatgtgacgaaagagcgagggatcaaatgtggtatcgatcgatgcaagatgacatccagagatcaaatgcaaaaatatgaggaccttgacggatattgtgtaattcagcccagagagattgatgccgactgcggattaggaactcgcgctgaggggaatcaatccaaagacatcaggtgaatgaagagggcgatgggttcagatttagagaggatgacccaagaagcagaagggggcgaaagggcatccaagactcagactcagagggtgagactttttaaggaacgggaagggcgagaaatgaaagagagaccaaatgcaatatgcaatgagacgatagatgcgtctacgcagtattcgataagatgatgaagattgtcgatggaggggaaggggagagaagaggaaggctttgcgaaggcaaaagcggagagcgtcaggtgcctccttaatattaccaaatatgggttgtacccgacacagaggcatttggcgccaccttgggggatttacccttccctcccttttttcccttgttgttttggtgattcatctgtacttgtacggaacattgtattctttgtttattcgcatttgtctcatttccgatctttgcaatctctctccagtactcgacccttctctgttacattgggtaccgacctcggagttgccactcgaatatcaaaattacatatccttcttcacataccattacatgccataggatcaatcgataactgtcagatcataatacgtacaacgagagacgatcgctgccagattctctaggttatgcctgatacagacggtacaggcggaggctgtagatctcgagcagtgaccatcacaatccaccacccgatgaactatttgaatagcttcggccgtttgtcctgaatagaagaagtttggaccgaaacagatagagcacgtagctgctgtccccataacaactgtgattccacaccacaaatgagttgtgttacatctatatatcggcgacgtcaacggcttcaaatgactagttaaatgactaggtcttaggatcaaagaaataatcgaaatgcttcttgtgcattttacgtcgaagctgtttatgcacatctccaagtatgatatacattccgtcactattgatactacgatatatgatagtccaaatgggattcaaatggctcgtggaacagaatcttgaaaatataccacctggcctggaccctctgacccctgatggctacacctataatgtgtaatattggtggagtctagtatcccataacctttctgatactccctgatgccgtttcatcagccctgaccagggtagtttattttgagaatgtgtttaaacttagcaacaaacaactgacagcgacttgctgaggaccaatcgattacccccgcagatgtgatagcgttggcccccaaggcctccatcacatcttgacagggtttacaggcgcctgcaacaatgtggcgcacagacggcgaactaagattagaacacctgcgaactgccgaagggaatccatgtccgcctgtttgcacctcgaaattttttgggggggggatcaagtttttttcgtttcatcctagggcaaggctttgagaaagacaataatagcggttatatcggttaggggagggatgatacattattataggcccctgcgcaagatcgtcaagcctaccccgccagactagctcagttccattggcgaatttcggatattggattggcttgacaaaattgctagtgtctatggaggttcatttggtactagcgaaggctacttctgcagcctgctttgtgtatactccttacaaagtacattcgtcttcgttctgatcgtcttgtctataaaaggggcagctcggtccatcgtatatggcccctttctcataagaagccaaacttagtcgccggagtatgaggtataaaaggcactcccccagagcatggcaagagatgttcgtgcaaaggattcctggggaatttcaacatccacaagttactaggatacaatgcagcgtccgaatctttgtaatatgtcttccagcatccgttgatatgcaaattgcttattccatagccggcgagtacaactatctttgagacattgtgttattaggccacaggtacacttccgtgtaaggagtcaggtctgggagttgaatctgtgcccgcagccttgtactgacacgacaacgtgctctttggaacctatacactcgtgatacatcgacttccgatcgcctgccacttgagtaaccggagagacgccatatactcagtagatctaatatgcacaatgcacgtgatgttgacattcattattcctcaagaaggagggaatggtcagaacttctctgagataagccgcatcatctcgttcttgaatcagaatgttcagtgcagggattcggatgtgtcttgtgatatgacgtaaactataactggttctgcttgggttctcatccctggagctgagggcgtgggaatggtgacacagatattggcagtctctcgtactcggtttcttttgctttcttccaaggtttgtcataggtgcttactcaccatgttgtatagttttgtatagattgcctaggagtatgagtcaatatatgactgctggaatatcaacggcatacagtgaggtccgtttcagatcacagccaaataatctattagacttcggacatctcgatctcggcgttggcgggtgcctttacagcccgagctgagatgagttcatctctctgatcgagggtttggatcatgactgtacgtacagactaacccatgttagaccgacaggtaatcatggctttctaatggcgtatctgactacgttgtgcctgaaaaggggaaaacaactattgtcgattcgctaagataaaagtggacaagggagagagagagaggaagagggagccgaactatctgatggtgatctgggtccacatgggtgaccgccttccggtcacccaacatcccccctacagatctcatatctcctgttttgaaaatgatgatcttaaaatgtcgtaatcgtggtagtcgtaaaaaaccccaaattttcctttgaattaagtcatcccaataagcttcaagaaagctcggaattgctctttaggaagcgccttcgtaaacccgtccgccgcgttctgctttatatcaacccttaggatatttatatatccttaggccacagcgtcctttataaagaaccatcggagtgccagccatctggtagtagacttacctcccttctttattagtagtaactgtaagttaatattattagtatagataactgtaggatcgggtcttagtaggcttagtaagtctataaccttagtaagccatatagtatcccgggccggctagttaagtgtatactattctactattattatagagttcgctataatcgtctactttttagtagactaagctactaggactcctataaagaattagatatatcctttagttgatttagagtctatctagtctacgtataatacgtctataaatactataaattgtagttcgtccaactttctaaagattagtcctatcttagggttatatctaaggtacttaacgatatatcttattgccttaagattagaaaaagtcggtattactagtctatattataggtatataatagtgaatctaatatctagtcttatcttaatagtaagctagttaagtatccctactactatttagtagtattcgaaattctcgttatcgagtagattagagttaatatcttctaggttagactctctctatcctagtagtagtagtatttcttttatccttatagtatctgtaatatatagaatcttttatatataggcttcttaagatataataatcgtcctagcgttataatctctattaagtatatagttgagatactattttagttctcctaggtcttttatattataatatttcttaagttactttataactaagtctatttctctggaagtaggtatagtaataataaagttattgatatagattattataattattagatctatatagttctttcctatcttaatatagatatacgggttatccttaaagggtctaaagctagtttattaaagcttatagtctatctccttattctaaaggaaggcagagtcttataggctaaaaagagcctagttaagtatatatacctattactttaaatttccttctatatctataaactcgaagcctattaactgtcttatatatactatctctatatcttctcttaatatattaaggtaagctactataaaatccacttaatactatttaaggctatagactacaataagtattaagacaattttaattatcgtttctaatataaccggtatataagactcacttaagttatcgcttttctcctagaagttactatagataacctatcttaccttaaagctatagactttatctcttatatttatcttaatagtaaaacgctattatcctagaaggacttttacctttagtagttttaggattaatatctatattctcttcgcagtaaggttattaagctatttttctattacttccttctatttattctagaaaggtgacttttatatttatttaaaacttaatagtaggttaatatccttattataaagaggttttctgttatagataaaaggtatatctatatctacctaatcggagttatctagagaaagtttctttacatttccttcttaagaagtaatatatttttctgtatacctggtatctctcttttacttcttatattcaatatttaggagtttttatttaggatcctaatatctctctagtaggatactaatatttctcctttttaatctcttagctaaaggttcttaaatttaagttagtactactattaccagttctacagtaggtataataggagtaaccttctcctatatctatatcggttatatagtataccgaggcactttataagtaccctacggtaatatttattatatagtagtttcttataaactacgttctagagtctattaagttagtaaagagaaaggatactagtactctatccttatctattctaggaacagagtatcttcccttagggttaactcttatatagagctggtttccctaattaagtcctattcgattaagtctatatactagtatacttctagtatatctatctcttctacattaattctagctataagttccttaagtcttctctagaaattagctttcctctctgctagcttctctgttattattatttactctatctaagggattatattcttactataaatagcctatatctcttcttaaattagagtaagagtctggttaactctttatactattaactgttctatatttataggaattagtatccctttctaaagtctcttaaggatcgatcttatataccttagtataggaagtaatctctattaataaggtattactagggtctctagtatagttaaaacactaccttaaattataggtaagtaaattattaatagggttactagatcctatctatagactattataatctctatccttagttcagttctagctatattaatcagtaggatagaaatttcgtttatattattatctcctagaggtttcgatagctttagcgctattagtactcttccttcctaatctttatcccctagttaaggaaagctgatatcccttaagattataatcttcctagtttctagattctagatttttagaatatatctattatcccccttataacctataagttatcctttctaagatcttagagtggctttatatacctatactctcttctctttcagaatatagatatagatagttgttccctatagtctaaggtactttagtaacggatctaggttatcgattccaagttctgtatactagtatttaagtagcaatatttaagactttagattggttaatctattaatagtatagattatagtttctactatatagggctatagctccttaggtagcttagtgttaataattattattctctagatatcgttaatatatccgctaaagcgttctactgtaccgttaggctctactatatagggtggtataactttaaaagttattcccttttttataccctaagtaataaagttcttaaattctattctactatcgagtctttatactctggggtagtacctagttcggaatttaatttttttataaaatacttaaagtttaacgaatgctttacctttatttgtaagagtcagtcccttaagatatcttattgcgttattaagaataggtatctagtacttttcactatttaggcccttaggttttataggctatatatctatataaaatttctatactatatcctaaacccgaaattgtggcttataagaaatctgtttcttagatttaccttaaaaataagctttatagttaaagtattctattctatactattctttatcgttaagctcttatacttattttagtattaaagtaagtttagcttttctagtatatctaaggtatcgatacgccttaaaggtagaaattttattaactaatcctatttctttgttactatctgacctataggataaatcttttttatataaattgttttctttaggactaataaggtatagaactctgagtaatatatttataactctaacagtttttctagtactatctgtaagtcgcttagttcttatattatataagatatcctattcttctaggagtttctatatactgaataatttactataacctcttaggctatagtagccttttattaggaaggtatatattattctatcttcgagatctactttaataaggacctctctatatcctttagttaccactctattactagagtagtcctagtaggtatataccgattctaggctatccttctagtatatatagaaatcttcgaagttataggtaagtattttatctaatctagtattaattagctagctgttaaaactatctatataataagctgttactataatagctatattactttgtccctcgctttatagtatgatcgagtaattctatatatataggctatatatctagtatataggtagatcttctaatagataggaatacttttaagctttatatggcctaaaactgtagtaggtatatatcccactcttatctctttatattccttccttcttttccttgatatacttatagatatctttactaggaggtagttagtttcgaagggtcttcttcttcttaggttcgttagatatatttaagttatccttcgaagatttattatcttagcttaaggaggtttcgctattacctcctttactatccctcttatcacctcgtcctctatatcctttactatggttattaccccgttcccttaaggactaggctgtattagtagtcctttctctatcggaaactgcctagaggctcttataatattagtctatctttttgagtatgattttcttaggttcaatattactaatttcctcgataataaattaaaccttagatatttctttatctaattattatagaacttataatagtatataaaaagggtgtggttaaattttgaatcgcaaaagaatgtggtattatttctagtattctataataaattccttcgcagtattaaagtccgctcgttttattttatcgaactttttagttttatttagcgtattttcggccttatcagagccttatactattaatataattttatcgaatattatattagcgaattctaggaggtataagagattctggattcgttcttagagtatattgttaacctaaacgtatagctagctagctactatatataaccagtactcctatctattaaatttcgggttacctacagtagggcgaggtatactgctattaataatatattctagtcttaatagcgcgagagtgaatttcacagggatcgcctatttataaggatttctggaattgtactcgagtgctttaactttctacattttcgcagccgagatatcaggtaggttagtggcctgattcttcttattatatctattacccgataacattgtattagcctggggttgagaggtatttcctatctcccgagacgcgttgttgttacctgatggcaaaaattgtgactgattattcgggttgttatccctagagtcgataccgctatcagccatgctaggagctggtttaccaattctgttattaattgaggcttgcgaggattaaatccgattggcgagaaacgcgcgttatgcgggttaagcgccgggaagtggggtccaggaaagagacttagggttggaggttgctagcggtccttgctagctagagacaagtgctcataacctaatggcgtatctgactacgttgtacctgaaaagggaaaacaactagtgtagattcgctaagatctaaatggacgagggagagggagagaggaagagggagtggaactatctgatgatctgaacccacatgggtgaccgccttccggtcacccaacacatgagcctcattttgtatggttgctggaatttaactacagcccaagttatcaaataggtttatgcgaaatggtcataatgatatctctaaaatacggattgttgtgacgcccccaaacagagacacgacgatgcaataaccactatgtgacatgaaacatttcgaaagttgtttggaaacgcgcagattcttcgctgtgattgacatgtgatcatctgcctcaactgaacgtcccattagcaggcccaaaatacccgacagctggcatcgacttgtatggtacaccctgggcgtcggcagtattcaagtacacgttattcccccaccagtcagggaaagtggcaccagggtacgagatgcaaaagaaaataacaatgccactgagggcaagacctgtatcaagggcagctgccaagatataattgtacttggtccaccaagcaaagaatcggcgtttaataaagtgatacactttctgaccaatggatgttttagaaggttcgggatcccactatactagttcaattgcctgttcgtggtttaatatagatatgtatatatgtatgtaattatggagtaatgtcactgcaaatctccgatgatgagcatctgcatgacagacgccatgtcgaagatcccgagtggagatcttggcaggagaggagcacatggatattcactgacagggacttgcccctgaacatccatggatgtatatagaatgacgaacgtatatccaacggagagcaaacgccgaagactatatcgagccgatcttccccgaaatcgaaatgcaacgtcgcagataatgatcgtccaacagtcagccgaagattcccccgggccggagttaaaaaagaaaaaggggggcaagacagcacaatggattgtttggtggagactgggcagagatgccggcttttggctcggagaaaaaggcccagaataagaatccttaaaagaatcctccaagaatcccaaaagaatccctgaaggaacaatccctgtttaatttatctctttaaattgcgcttaccaatgtcctggaaacggttggacccaccagaacgggagttgaagccgaatggcacgatactctagggctaatatatgtcatatacctagacgcttgctattgcacggagttctccgtgcatatctccatcatatccaataattgtgatatgagttactttaatagccaatagatcaatacggacgtactccgtatttagccacagggccgtgcaccctgaacgaacgctcagtgtgaagcttggacctgcacggagtacggagcaggtcaatattgtttaagcatagattgggagttggggatcgggagaagatcagagataaatatggatatggcagttgcaatcatgcgagaatatcgactcatgtctggaatatagggtcatcttcttcacataaagggtaactgggacataaaaccggaattatacccagaatggacatggaggatagtccaatctccgttagctccataaaaattaccttctatgcaaatggaaaaggggaacgcaacgcaagggagtccatttagctcgtgaagaatgtattggcgtacggtacttgatatgtcctatgatacaggttgttcagagccgccggcggttaaaccgtgacacttggagtaaatcactctttgccgctgttactggctggatttacactgtcttcagtctccgggctagtggtcttagcacccagccgatcctcaacgccacaatttcgcatattctcctgagatcaggagggttcaggagggtttaggagggtttaggagggtttaggaggggtgatatttttttggctttgaaaacttggaacagctaactatgtcagcacaaagtacctacctagttaggtatatgtacgtcagctctagttcgaatatcaaccaaagaaaagaaaccggcatcaggtacccgtaaagcaatatagagtccactgaaagaacttgcagaatggaaatgaggaaactctgaactatacggaaaatatgtactatagtggctcacatatgtcacgatttctttcatgcagtacgggaaaaatacagaaaggtactttggatggcatacaacttgatagcaactgaaagtaccctgcttattcccatgtctcgtattaccactagtaatacgctgacctccctctccttgctcggtctttcaccccctgttcctctctctctttcttctcggtctgttccttttgttcctgttggctctttttccctattctcttattctcgacttttacttaacatattatgatccaagcctaaggccctttcactcggttccgcctttcgactttctctcccctgcttcttcgctccacaccttccattcagccccctctctacccttcccctctgccaatctttccgaccaccattgttattatccggggtacttcgacaaaatggccgatatgagcggcgaacagatgcaggccaagatcactgcggccaggcgcgaagctgagggtttaaaggacaagatcaagcgcagaaaggatgagctggccgatacctcccgtgcgactcccatcacccattgttatgcctaaagggtttcctccccttttcctctcctgggctgtggtccagtacatcgtcctaggagactcgattaaccatactgactttgctctcccgtctagtccgtcaagtcgcgcagaaccagaccgacgccctaccaagaattggaatgaagccccgacgcacgctgaaaggtcatctcgccaagatttatgccatgcactggtccaccgacaggcgccatctcgtttcggcttcgcaggacggaaagctcatcatctgggatgcctacaccacaaacaaggtccatgcgattcccttgcgctcgtcctgggtcatgacctgtgcctacgccccaagcgggaactacgtcgcttgcggtggtctcgacaatatctgttcaatttataacctgtcatcgcgcgaaggcccgacacgagtcgcgcgcgagctttccggacactcgggatatctctcctgctgtcgcttcatcaacgaccgccgcatcattacctcgtccggtgacatgacctgtatgctgtgggatatcgagtctggaaccaaggtcaccgagttcgccgaccacctgggtgacgtgatgtcgatcagcatcaacccgaccaaccagaacatcttcgtttccggtgcatgcgacgctttcgccaagttgtgggatatccgtaccggcaagtccgttcagacatttgccggacacgagtccgacatcaatgccgtccagttcttccccgacggcaacgccttcggtactggttccgacgacacttcctgccgtctgttcgatatccgtgccgaccgcgagcttaatacttaccaggtaattattttactcgagacatttgattgacgaaaactgacttgatattcttccagagcgatcaagttctgtgcggtatcacttccgttgcgttctcagtctccggccgattattgttcgcaggttacgatgatttcgagtgcaaggtacgctgagctttttcccccgcaacacgactagatgctaatctacttaggtatgggatgttctgcgtggcgacaaggtgggttcgctgagcggccacgaaaaccgcgtgagctgcctcggtgtcagcaacgacggcatcagtctgtgcactggatcttgggattcccttgtaagtttccctgcaattgtttatgcacatgcatctactaacctcggatattctctcgtatagctcaaggtctgggcctggtaaaccaaaaaaagcaaaacgctagataccccgtgtcgatcattctgcaatgctcttcttcgaaatattttaggctcgatggttcgaatcaccgccattgtacgataataatcaattaccggggagtcccttgggttcccacgataatacactacccgcggcgcagacatcgtcgcatgcgatacggaaggtgatggaggtggaggtgagcgctatgggatgctgtcccggcgaacaaacgatagcgatgacacaatacttgtttggacatgacgagagcgcgactagtccctgggtcgatggatgtacagtgactgccagcagaagggaatgctggaacgagtcgatccatccgacacctacaccgtcgccctcttctcaattccccttttacttctcgatgacgccctttccccttattttttcttctttgaattctttatcccccattcagtttaccgtttcgttctggtcatctccgcattggtctcgacaattattttgttggcaaaggcaaaaaagaaaaacctggttaccggattctagccaggatgtctctcgccgatctacctctgcgttaccttattattctctcttctcatttctcctttcttctttattctctcctatccccccttatttgtgtctcctctaaagaaagagtccgttgtacttaactgtctttgcgttggaatcttgctctgggattctgtggtgtcggattttgataatggttcaagcagctccaatttccatatgtgaactttttttttcaactcgatcttccatttcattgcactgaaggtggtgatagtagtatcgggaaacgtcggttcatgtctggcttgattctctaatgtgagcctggcgagtatcagacatgtcttgaacctcggtccagcctagggtagaacatgccatccctagatcatcctcgagggagtagtctctaaatagtcggatgggataccgtagcaggtagtacgaccttcggctccacgtatatcaggccacgaacacagccaagagcagtggctaggggaatgccacgcatgtcctcgacctcaatcacaccggtccacattcattgatgcctaacacgcagctcgccgattctgggatcgccttgccccatttctgacatgaaacaagggaatggacgtgtaggagggtcgtaccactgacgctagagagagggactaagacaatagttgtagtagaaaccttttcagaagactaggtcgaaataagaacatggacaggatcagcgttgtggttatccttataataagcatatacgctagaggagagttcatcctttcatatcaaaccagactgggaatacgaagatacgcatccttctagaaaaagaaaagaaaatggaaacatctagacctgaggattcattggtggagacatacagatctacatcgttgaatggggctaccttaaagtagacacttcgtccgtagacacgtcacatagttcgggatattatgaatgcctccacggggaatggagatcggagcatggagtagagctggtttcaaagggataatgaattggaaggctattgagctatcaagctattaagctattaaggtcaagtacgagtatgttagtatagcttgaaccgcttgatatacaacttgggcatacaacacgctataatattgtcgagtccatttatataaatctcgacaaaacattctaaaacaaatgtctttgaccttgacagcctcctagggctcggatgtcctatgtggagcctgaaacacaaaaaaagggggctgttctcaccgtttcatgacttccatggcttctcacgacgatctcttccaacctcagcctcatctccgtttcaacttcaggggcaatcttcgagtatctgcatatcctaatccttgatcctggtccaatccgaaacacaccaaacagtgcccgatcccagatctcccaaattagctcccccctctcacctaaaaacgcctttgcccgctctttcaacatgtccgcccaagaagaattcaaccagctggtgaacaataaccgttcacgcttcacctcccatccagaagaccaggaatcagaaccttacttctccgacgaagaacccgcctcccgcctccgctcccgccaaacagtcgactcctccgacgaggaagccgacgcagacatggtctcctcccgcaccgccaacgcaaactaccacatccccaacaccgtctacgaagccaacacaggacccaagggcgttatcgccgacgcccaggccttcgagcgcgcccgcaagaagtccttccgccgcaccctcctcagcgtcgcggggctcgactccaacagcgcctcctacagctccaagtccacccgcgatgacgtgcccctcgcggccggcgaccagtcctccgccagcgaggacgacgacgaggcccgcttcatgagcaagtggcgccagtcgcgcatgcacgagctgcagggccggaataatcgccgtgccagtccgcgcggtagacgctatggatcggtcgagacggttgatgccgcggggtacctcgatgctattgagaaggtgacgcctgacacggtggttgttgtgtgtatttatgatcaggaggtatgtgtgggatttggatattggatacaattgggagctaatttgttatgttatagttcgatgacagcgctattgtcgaggagtgtctggtcactatcgctcgcagacaacccactacccgcttcgtcaagatgcatcacgatatcgccgagatggatcacatcaaggcccctgctctgctggcctaccgtggtggtgatgtctttgctactattgtcgatgtcttgcgcaacattcctcgcggccgcagctgtagtgctgacagccttgaggacttgttgaagctgtgcgtattcccaggctcttgttcatttcgtactgagacatatgctaattctcgattacaggcaccgtgtgctatgatactttctttgctattatgttttcagtccgtccacatttatggcatagtagcaaggcgtcttggttgttccctcgtgatctcctctgcatgatttgatttgatttgatttgacctgacctgacctgacttgacttgaattgtctttcctttccttcccctttctttccctctcaaacactctctcccacctctctctttatgtcccatccctctgatgttggatgcactacctgcaataaaaaacccaagaacagatcttcttgaaacggcgttggtcactagaacaaagtgtacacgtttggactcggcaggtcgatggtctggctactatcttgccgtgtcatgttagacacgttgcgtttctcttccctccttgtctgattatgtccctactatttccagcccggccggagccgggcttgatgttgatttacacgagatatcccatgctgttattactgttcctgctctatcttctctctcgctggtaatccccttagactgagccctaaatatgtaaactagggttccgtatggtcatctgctacacccagtaaccgagaaggaacaaaaggcaagaacgaagggccgtccatgatgggaaggcacgtgggtttgggggaaggtataaaatggcccctcccccatttctcttcttccctcctcctctccatctctctgaccaccatctcaccgtagcctctacgagacagcgtcgacagaggatgatgtagcacatgctgcttcacctaccacagggatcataacattactatatttgttatgaggtccatgtaggtctgcatcagataacaaactgggctttctcgtggatgttcctgaagtcgtggctctcattgccacttgacgagtcccacggaatacatgaggggtgtaaatctccgtagccgaagacttgtacatatagatggtcacctagttgggtagtcacagtacactttcacatatagctctaagtctaggcttgcgtcatgggtctgacttatatgtgaattggaagattccattccaggaagtcccacagttctatgtgcaagatatcaagggtcacatctccagagatccaggcaaagagatatgaaagacagccccaagtgaaacaagcttgaatattggtataagacccatattatccagtgcaaagcatcgtaaggaaccatttacgtggttctcgaattccaagtctccctctcaagcaagagatgagtgaaatgtaccacgctcatatcccaccattccaccatccccgagaccacgagaaaagaatacgcgcatttcataagagaagcgcgagagcaaaaaaagaagaaagagccatccaatttccttcggtagtccgctaactccccgtgtcaaaagacagaaaaataaatgagaaagtaactagacgcatggccgtggtgaccaaggatacatagcaggtagagaaagaagcgaagactcaagaaatgagaagaaaatagaataaacactcccacgcctggtttctctcccctcttccgctcagtcggttgtctcttacagggctccgcggtccgccgtgaaatcccagagcattttgatcaacgcgtccgggagcgtgtacagatccacgtggaactctccgactgtagaaacgaaaggagaaggttagcgtgttgttcagagtaaatttcaaggaagcagagaaagaatacggagtttcccttccctgacacacagaggaacttacgctcaacatcgttctttgtgtatgagtccgccgccttgtggtcatgaaccatctgcacgacctgcaagaggtcatcttcgttcagcttctgaagcccatcggcaagcttgtccatgtcaaccttgagagggtgtcagtcctgcagcgccaacctcagacccatctcatagaaccaactcacattcttatctgtgcgcttcttcttcttggcgctctcctcgccaccagcagggcgcttgtgcttgataccattctcatcaccggggaccggaccggactcgcgcagcgcagccatcaaagcaggcttggggttcttgaaggtctgcaccacaaaacgcaccgttgatcagcacaccatactttcgctatcaggggaaattcaacaaactcacaagcacatgcttagattcataacgggtctgggcgaagttcaggtcatgttgaatcgtgtacgacttgtcagcagtgagctcgatcgacatatcgaattcaccccatccctcctcctgaatacggaacggcgggtgcttgaaaactatttgaagtggacaaatcgtcccacgttagcctctaatcggaaaacaacacacacacaccccccgcaaccttgatcgcgcggccgtgggagtctgggtcgccagataacccaaaaatcaaaaacacaatagggaccaaacataccctgcgtggcacgttcaccgaaactggggtgcaggtggtaggtgaccttgtcgaagatgttcgcggggaccaaggcgcccttctcgttcacgagccagacctcaatatgccatgatcgctgtggaaaaccctcaacctccgagggcttatctctgtagtgtaggaagaaatcccaagtcagccaatgtggtctaatcccgcgcgttttgtgtgcatgtgtagagatgggcgtgggggtttgaaggaaagagtggtggtttgcaaagcgcgcctctccctataatccttgtgcgcattatcatctttgtgtcctgtaagctacaggacggacgtgacgatagcgttgacagggtattgtgggaggagacagtagctttcagaccggggtttgcgaagggagggaaggcggagataggtagaggggcgcatacataatgttctgctcggtgatgagacggacagtgcgcttgacctgttgagaaggagtgttagtgtatgcaagcttaattgtgctaagaatggagaagacaccaggtttgggcttgtcggctctagcgacaaacccacagtccaaggccgtagatgcaagtttgcggcagttgatgagagggttagatactcacgtcaggcatgattattttattggcgacttcgggtcgtcacttgagagaatcgtgaggttctaaggttttgaggccgaaaggggacgttggcgtgcggagaggtgggcgtctcggagacaagtttgcgcggttgtctatcggagtgagcaatgagcgtaggatatcataactaggcaatacctcaatgtaaccaggcagtaaggtgtatgtagtgaggttggtctattgatatattctcaaggcagttgataaagcggtgaattaaccttggaagctcaaggaggtttgagaatatctccaggcctatgtttcatctgacgctctctcactttctgatgagttacgcgtttaatctaaatcgtcttgagactatttggatcaaatggatatggctataaacaaatttactagacttatagcccgagcattgttccagcaaagtgcaagcaaaatctaatctttcggttttaaaaatgtactattttgtattattgcatgcgtttgcttgttaggcatactcatcattacttttgtttgtctttgttctttttcttcagatatcttcagggtatggggtgatgtgcaggtatattggatggggaaatgtctatctacttcccggagaaccatcgacgttaggaactgccctccatttcgtagactgcatggctcgcaatagctatccgaggagcatcttcataactgctgcctcgctcgtcgcgtcgtatgggatggggtgggaatgggatgtattggggatgattgggtggaacggtgtgaaaggggcgaaattgggtaatttttcaagagcaagctccgggacggcgtacccaaatgccttggaacggcaagtgcaccataattgggtatgctcgatcctcgaagagtcagcaatacgagagaaaaggagttgtttactcttcggcgttgaagagcttctcgttctccacctgggcggtctcgaaagcatccttgaaggcgttggcgtctatacccatggttagcgaatgcttgaataaagttgggataaaaaaacttactctcgctgttagcgaaacggatggccagggtctgagcctcaggctcaccctcagagacatcggcggcggcgttccagacccagctgcggtcactgccgacgttggcgctcaacttcatgtcgggcacgactggaagatacatattagcacgagatcgtctttgggaaatacgagccgtgggggatctcactgtagtggttggcgcagaccttaagggtcttatcgcggcgcatgactaggcgggtcttctggttctccttgtgcttcaacagacggacgtcgccggtaccacgctccttccactccttagaatcgcggtcgaacttgaacagcttggcgcgcatcttgaaggtctgctcctcaagctcctcgttggtcttagtctcaaccttctcggtcaagcgaatcacgggctcgaagtggacatcgacggactcctcaacttcatcctgaatcaaagaatcatagtcagtatatgcgcggagctaaaatagtcattgacactagcatagtatggcttggttgcgacgaccccactatcgggtgacaggggcacaagaccccgctcccatcgcggacacgtccaacaacaaccgcctatgccaacagcatcagatgtataaaactcacctcatcgttggccttctgggccttggaagagccggagggctcatcagtaggctcctcggcctcctccttcttctccttcttggggccaccaccgaacatggagaacatgctgtcggaggtcttcacggtggcatccttagcagtgtcggcagccttctctgcggtagtagcgacagtctccgcaacggtctcagtggtagacttctcaccctcgccagtggcggtggtggtctgctcagtggtctcggaggcagagatggcggggtcgggcttagtctcggtgatgtcagacatgttgacgaggggttcaagagaatcggtttgaaaggatagaaagagagatggcagatttccccgggaggtaaagtggaatttcagtaacagataatgtttgttgatcagagaaagcggcgatgagggggaaaaaattaatacttagtttgggtcccatacctggcagaacccgccaccgcttttgtctgccaatagtgtactctatataggtgtgaactacatgcaacgtggggaaacacacatcaaagagaaaacaagtgaacattctcaaggccaaagtgggattacggtttaaataagagataccattgcgccgactgaatagttcgcatgaaaacccatttccagtacagttgccacccaccaaacctgatcgccataaacaaaaaccagtcctcaaccaactcattaataggaaaaagaagcaaatacaaagtcgtaaataagctcgttcatcatttcgagccaagggttgagcaatccttggatttgccggaccggaatcccataacatgtcgcgcacgcgactgagctcgatccagcgcatcacatttcctgacgttacgcactcgatccatcatgctgcgaaggtcaaacttcggcgctgacttcccaattcgggcccatgcttccttaacaaggcccttggcttccttgtccacgcggctagaccgcatttgcaacacagaagcagcacttcggaatcgctggatagtattgcgagtgaggacgtctgagatctgcttcgaacgtgataaaacggcatcgcgtgcatttagactctcacggcgtagctcctcggcatcacggcgcaagagatgggttctctgcaccacatctcccacgatcacctgcagatcggtggagaggcggccgtatacctcagtcaggccggtctgagccgtatggatttccttggcgaattgtgaagaaattccctgtgctgcacgcttccagtttgcgatcttcagccatggggttccgaagtcaacagtcatggtctggctgattggctgccttgacttggttgtaattgtcaagttgactaacccgtacgcatcctcacggttcaacttcagtgtgtatactccatcgaacagctgtgacaactcgtatgtaagagccttgttctctctatgaacacttacattgaattgtggctgcttcttggacgatgcaaacttatatgggggcttgatgataacatggcagtctccaataacctgaatctcaaattcgttcgtcattcccgatgatttctcagtagaaatagttggcacagagacatcatcggggattatagcccctgagggcacatgcaatgcttgcatagaagctgacggccgtgttgagattgaggtttgtaccactcgatccagggtcagaacagaagtggaagagacattggaagtcactgggaaggatgcattggatagagctgatccggcaaagcattgcgctagaaagacgaccagcactctaacagccgcatacccaatagagatggcaatggccgaaatgagagtcaaggtaaccagacgcagcgtgggggccaggtctcgggcccgcgtggcataggaatgtgggagccaattaccaggatacttctcaagatccgtaaatatgtggctttgaggaggcttgggagtatcggcagtggctttctgtgtctttctcggatacaggccaacaagagaagccaggtttcgattcaattgaccaggtgtgatgctctcgaaagtcttcaaatcgataggataccgtcgaaggactgcggtctcaccggaaactggatggcgggactccaaacatgtgtgaagactgttgtggttaagagggatcatctcgccggccatcttccacagtggctcctccgaaatcaccattgccgggactccatgacgttctaggaacatatgggcaagacgctgggtcttgaccgccgctgcatcgtcgaggccggagacaaagagaattgctacatctggtagagtccaatctgttgcagacgttatatggtagtcggaaccattccaggccgaagtgcaaaccggacgattcttgaacttcaggttcagtgtattaggtcggtccgcgtggggatcggccgtggcttccaaacattcgtcaaccaccagctggacatgaatcggaagaagttccgcgaaattcggaacagctccggcgccaaatgaggttggcacgacatgatatcgagaagattcagccgagttggtctctgaaccagcacatgagcttgagacaagcacatcgccgatcttgtcgagaataatatttcggaatcccggttgtccgacatagaacacgcggaagggtttgtccaggtcgagactctgtttcgtcatggtctgttgaagcgtggccatgaggatggagtcggttgaattgtaaggcagccggctcttcaattccaaggctgcagcaccttcaaagatgcggatagtatgcttgagctccactctctcgatctcgggccacttctcgggctccacgaattcgatcgaatcactggcatgggggaaggagggcttagtggttgtggtgctgtcatcgatggtacttcgtctggcagcaaagagggcaggcagctcctgggaggccgattcagtgcactgcacttcatccctgtctattccatcatcctcttggtggtcttcatcctgggcctcggcctcgctctcactgtagcgttcatcgaggcttgcaacgtcgtcagggctagcctggtcgatcaacgagcctgtatcggtttgttcggagtggctgccatcctctgaacgtatgtccgacacactcagagtcgcccagctatcactcagcgttttgggtgaatggtcagaaagttgatctgacgtcatgttggtgggccgtgaacgtgataaccactcctcgacagaagctgtcaggggtggaagagtcggatattgcagattcgaggcagtctgggcacggtggaaacgcctgtgaggcgagtctggatcgtcagtcatttcgccgatgtaaacttcatatagcacacgggtgcggcggaaacaggagcttagggatagcccaagcggtaggaagaaggtcaagaaaagcagagttagaaaccgagacggagatttagagcagggtaatagaaaagaaaagggaagatcggaagatactgggagtgctaggcagagactcagagagcccaaatagagtgataaggtgggtctgcggggagccggatgtcaggatgggtcaggtgcgtgtctgacttaaggaagtaagggcttacctaggtgaaggtgtgaaagcgacaaaggccaaagagaaaagaagcaccgtgaagatcaagaagtataaaggagaactgaaacgtagagcgttgacgaagggggggagttgtgttgcgataagagaatactagaatggatgacccaagtgacagtaatagtgggggagtacaaggtacctagcagttgtatgatggtgtcacccatgacagaagtactgggtacaagtcactttgctacctaacggcaactctctttgtctgcccctcgcaatgcagatgcactccaaggtactccaatatactccaaacgagagaaagtactaacttactaaacctatcatctctctttctttctttctacctattcttatacttctctatacttgataacgaatagctccactgtgccccaccatgaacactaaaaacatgaactacacggaaatgaaccgcgactggaaaaagacagtctagattgatctagttcacttgcatctgagaaatccaactctctgagagtagtgtcatcttcaccttgctcatcggcgtatgacccgaacaaccctgcacgtgggatctaaatattgaggatggcaatttgtacatgctgatactcatgtgtggtcttttcgacaagtaatgtcaagtgtataagcttcactaggagaacaaggaaagaaaataagagattatagattgaagctaagcgaccgggaaagctctagatgtaataggattccttgactacactgaagtttgaccggagccctcatatattttatatttctcactgtgcgcactatatgcctgattttatgcatatatccaagaatgacgtgcgcctttgatccctattcagaaactttcggctcgtataatgccccaacacagcagaactcctgacagcgcatgtagataccaataagcctcgatccactcggggccacgtatactcggtcatcccacagccttaggtagttgtcagcagacgccgcatccttgcaccccattttcagtcaggtataatgaatgatacgggccatttcatggtgcaggtcagcggaaagcctaagcttctcgtaacgaggctgctcattccgttcaacctcgaactcgattcccatgagcttgtgctctgtggctgcaaccgacaagccaagaatccgagcatctggtgcgaaatgaacggcttgacgagtctcggtatcggggtcacttgtgctcgctgtcttacctaacgtgtagacgaagactagtccgactattgcctggtctttgaagtaggtctcggctgtgattatagtctctctacagtcctcatcattctgcctctcaaactagtgtttccgtacctggtcaaaaggaggtacttgttcggggaccaatatgagggcttttgggcgacttctattcgtaaagatgacagctcggacgcgttcagaggatgggttcaatatccaagagatagctgtgagtcggattcaccctgatactggtggcgttgcagcgcttgggatgacatggactggaagtccggagggcggaacgtcacactgcgagaacttgtcgtctcgatgtgtatagctgcgactttacctatttccaaccccagaagaagcctactggaacgagccagatagtcaagttcaaacccatcatcgagttggtgaatccattgtcctacggtgccaggacttgaatggttataatactcgagcttcaaaccggacatgcgacttcgagatctggattgaccttgtatgcccgtagatgcatgaattttccggacgttcttgagtgacgaataggtctgatagtcatcggaatttctactgtatatgaaatgagtgagtagagacctcgtacttctgcataccaaggtcaaatgcgagagtgtgaagacgctggatcatcatcactgtaggggtcgggcagcgaaataactccgcagagagggcagtaaacattgggaatcggaatcatcgagatatgggccatacgtttcatatccttgctttgaaatgcacaatcccctaatctcactagtgagtattcaaacggtagaacatgtaacaaatatcttacatggagagctgtagaaatctatagacaggcagtccaaaggatgggtaggatttaggcatacaacctatggatggccgggatccggataattgagtatctccggcctatggcttcagaaaggctcctagccttcagacctgttcaaatgtactccgtgctagtagatagctagtagatggaatcatgattaggcttcaagaaggtggtgagttaatcaacgaaaccacttgacaaggacaccaggtcctaaacagagatcttctccaagcgcccggacaagccgaacagttgatgaaaaggagttcgcatcgatcgggggtagtgtaagcccaatgacactgtgcaacgaggcatatgcaagcatagaggccaagtcgcgaggtccaaatattggaataatcatgacgttctgcaatgcagaactaccagcgattaaactggcaagaacagatactacacttgatctaagccagaggcaaagagagctgaagaagaaagaaaagagaaggaagttctgggggcagggccaccttcttatagtcatcctaagagcggtcggcttctgccactattcacaaatgagacaaacaacgacatatgctcgcttaagaaatggtaacgtgatgatgagaacaggaacggtgtctcttatttccggtttctttgatgcgaggccatcatgtttgtttcttctgatatcagcacgagaagggctactgatacaatcacacgctaaacttgtttaggtatgtctgccgctggccgcgattctatatccaataagagtatactaaataatttcccttccttccatagatattggtacattcaattgtattacttgaaactgtgagtagcacagctggtaaaaacgactcttctatttagaatttaaatgtccaaaacatagtaaaaccgaagaagtaaagtgcattatactgatatcattcttcacgtaattgaccgagtgattattccatactctatagacaaccatgcttgatctggtatttgcgagggtcaagggtgggcaatgcgagaaaacaacccgtggatgtatgccacggattcaaggatgggtggggagagaggaaaggtatgtacatttcatgaatgcatgctggaagacaaaccacaaaaactgtcacacggggatggggatgggaaggggggaaagctgctgagaaaagaagtggccgatggggaggcaaaagaaatatggcacagagacgtggcgggagttgcttggggcgttgctcccagcctccgaatcaatggtctcctaccaccgagatgaaggtgtgctcctggtagaacataggatatagtgatgaaatctggagaaaacattggatataatggttgtcgagaccacatggtacagtaccaatgttccactgccgatgacacacaatttcttccaaatagaaccaagggatgaatcacaacagccaaacccagtggcacagcatgcttgatgaatgtgacaacagtgatgatggaaatggtaacaccatcttccgataataaaaaagttcagatccgttgaacgccgcctaggaaggaaaccctatgaccaacataagatgcaggctccagctggaaactctcgagggcggacccaagggatgcatgcagccgaataaatagacaggggagaaggagacgcagaaagacgtggcaagcactgagcactacggcaccagcatcaagatctatggcgaggcccagccaccagccacgtccacccattcgttgagacagctgccttgcttgccctcaacatcgacaatgtcagtgtcgcagcggcatcggcaaccgacaccattctccttgacttggtcagggttagcccagtattcgtcttcctcgatccgtttcttctcgtcatcggtagtcttttcgaggtaagggatacgggtgagttggcgggccggagcgttggccgggcaatgctgaatggtagtgtggcggtagccaaagtcacggaagtaatgaatatcactaggcgcgaggagagcacctgcggcgagagagtgaataggagcatcgccccactagtacagtcagtaaagatcccctggcacagtacaaagacataatataacatacccgctcattccaaaatcctccactttggtccatcatggtgaagaagtcctcatactccttgctgcggaaccaatccaggcgggcaatctcgaagttgctccagaaatggcacatgttgtagctctcgccttccatggcctctgggtctacgtccttcagattgttgtcaccggggtctgtctgcaggatttcatctggcagtttgtcctgcttgttctcttcgggagtttccggttgctctggttgctctggctgctctaggaacatttcccacagacccttggacttgaggttgttcttgcgcttgtaagcggccgcataccggaagatgttggggacagtctcgcgaagctctttcactgcaattgtaaagccataggtcttgtttgcctcggccatcttcaggaatggatcactaaaggtatcaagtcagcagattgactagaaaaatacgccggagtaggtatcttactaggtgatgtcgcagaagtacttgatctcgggctccaaacgccagtaccactcatacttcatcagcagagggtgcttgtagaagtgtctatcgcaaagttagctttataatccaagtccaaatctgccattgaagactgaccctgagtagaatcggcacatgtggtgatagctttccattccaccgtacatgatggcagcgtcaccctgcttcttgatgccctctttggcaacctcatggtcaacccaatcagggaatccccacatgctgttgtcaatcttgccgaattcgacttctgcgctggtgtagttcttgacggttgccttgaactcctcatcgaagtcaccatcgttgaggaaaacataggggtagtgccaccaccggttgaagtgtctctcgattgacttgagcgactggatcacgccctccaactccttatttctggcaaggacgacgaaggcggcattggcgcggggagcctttgcgatttgatcgggctcaataggcatacagcccgtagcaaagactttatcatatttttcgctgatttttctgtagaacgcgggaggttagttatcgcaccaaggagcaccaattgacagggcgatacgaaccggatagatggcggagtgcccgctggaattaggatccccccgggagaggcaggatgtcggacaaagaggagcagaataaggacaattacaaggcatggaaatagtaaaacaagacccaggggtatagaaatagatgagttgccctttaggcgaatccgccttcggaaaaaggcgaatctaggatggaggtggcccttctcggttggaacatcctccaacggcagactcggcgcgctgggcagccgtttcgtgatgcgttggatgaagctcatgagtgcgattattgtgagaccacacggatgattgtagcggtcagctgtcaggcccgggcgacagcacggggccgttagggagatagcggagatattgtgtcgggggtgtaatcagaggaggactgcgtcttgaggagaaaaaagttgagcacacgatcagaccgaattcggaccgtatggatcacagggaaatccgaaagtcaaaagatctcgagaaaaatggagaaaatgacagcaaaacgagtggccggaggaatgcctcctttcgtcccccaactttctcagtcccacggtaaatagatggggaaggcgttgggagaaacgcgggcaactgtgaacagcaaggtacacagaggagagatcggggacatcaaaacaggatgagggtgatggggggagagaagatggggaattggaagacgggatgggtcctaaagggctgcttgcgcctccctggtcttggcgaagtccggtggcctcttgtcaccctgagacggttattttacccctggttactgtgaagtggcgttctacctggtatggtatggtatgtatggtatttcgtggtatttcaggtgatcttctactttttgtgcgatgtacggagtattcttatattgaacctcatgtttctagcatattccctatatttgactcttgagtggatttgatgctgtttatttaccggattcaggattggcctcttatactaaggggcaaggtggttcagacggtagtacataccactcgtattagcccctaagctaacgaggaaagcttttgtgcaatcattttgatcccatctgcgaagactatgcttgtgctcgtgtgctttctatgttgtacaaactcttgtacctgaatgaaaaaaaatccgatggtgcagcttattgtatgtagtccacttgatccaccaatgcttagccctacaaggcgacacatagaatatgcgaaggcaatgactacgggtatggatacttgcctctggaatgtatcagttggcttaaatggtcttacacatccttccaagatttacccggataacctccaactcggagccctgggacgacctgtttcacatcacatgcttctatgtagatacaactcgttgaattagcgcatgacgatcgagggtccaaactttcgcaggccgttagacccgaaaatagcagcaatgattattgtgggcatttgaccctgtcatctgccattcagtctcttttatatgtggcaattattgagttggttaagtatcaagtacatgatatctcatgataacaggggtctttatgcaagtactagatacattatattatcctgccaatctcactacacgcatatgtgaggcaaatacggtattgtactgtatgtaatgcaaatttcattatccctacgggtctcctccgaggtctggaccgggttatctttcttaatttgcacgaacaaattgcaaaggagcggattacggagtatgttattgtgatatcttatggagtacatgttacagagtacgtcttttggctttttcccctatatcaccgacctacatttatagtagctacataggtacggagtacatacggagtacatgtacatatgtcggtagactacgtagtacgtatacatatttgttttgctcgtgtgcatcgaagaaattactcgaaggaaacagaattccaacagaatatatttagtttagcacactaaaatacaccactttcatatcaaagttatataatttcccatgcacactgtagatcccaacttgcttgccgggaagccaaaggaccaaaaggcttggttccggatcccggtcatccccccatcaccacactccgcatgacaataaactatatggagtcaccaccgtggggtgcccccttttttcatttcttcctttctacatcacaacatgactgcagtggtgaccaggcccttgtctgagggcaaaaccgcgatgatcaaacctccggaacccggcccctcgtcccatttccacaacaatgggaatttggatcccttttcgccagtcaacgagaatggaagcttcgaattcgatcgagtcttgaagacagggagagtgtgtcgacgagtcaagcataaacacgtctttcgcgcctcatggaaaccagcctacctcgtcctccgaccgaacctcctttccgt
